(19) United States
(12) Patent Application Publication
(10) Pub. No.: US 2017/0275373 A1
(43) Pub. Date: Sep. 28, 2017

(54) BISPECIFIC SINGLE CHAIN ANTIBODY CONSTRUCT WITH ENHANCED TISSUE DISTRIBUTION

(71) Applicant: AMGEN RESEARCH (MUNICH) GMBH, Munich (DE)

(72) Inventors: Peter Kufer, Munich (DE); Patrick Hoffmann, Munich (DE); Markus Münz, Munich (DE); Matthias Klinger, Munich (DE); Elaine-Pashupati Dopfer, Munich (DE); Elisabeth Nahrwold, Munich (DE)

(21) Appl. No.: 15/329,668

(22) PCT Filed: Jul. 31, 2015
(86) PCT No.: PCT/EP2015/067627

§ 371 Date: Jan. 27, 2017

Related U.S. Application Data
(60) Provisional application No. 62/031,777, filed on Jul. 31, 2014.

(51) Int. Cl. C07K 16/30; C07K 16/18; C07K 16/28

(52) U.S. Cl. CPC C07K 16/30; C07K 16/2809; C07K 16/18; C07K 2317/31; C07K 2317/622; C07K 2317/56; C07K 2317/565; C07K 2317/33; A61K 2039/505

(57) ABSTRACT

The present invention provides to a bispecific single chain antibody construct binding to a target cell surface antigen via a first binding domain and to the T cell surface antigen CD3 via a second binding domain, the construct comprising two FcRn binding peptides. Moreover, the invention provides a nucleic acid molecule encoding the antibody construct, a vector comprising said nucleic acid molecule and a host cell transformed or transfected with said vector. Furthermore, the invention provides a process for the production of the antibody construct of the invention, a medical use of said antibody construct and a kit comprising said antibody construct.

### FIELD OF THE INVENTION

[0001] The present invention relates to a bispecific single chain antibody construct binding to a target cell surface antigen via a first binding domain and to the T cell surface antigen CD3 via a second binding domain, the construct comprising two FcRn binding peptides. Moreover, the invention provides a nucleic acid molecule encoding the antibody construct, a vector comprising said nucleic acid molecule and a host cell transformed or transfected with said vector. Furthermore, the invention provides a process for the production of the antibody construct of the invention, a medical use of said antibody construct and a kit comprising said antibody construct.

### BACKGROUND OF THE INVENTION

[0002] A decisive question during the development of a pharmaceutical composition is whether the active compound quantitatively reaches its target to show efficacy. For therapeutic approaches which make use of bispecific T cell engaging antibody derived compounds e.g. in the treatment of cancer, viral or inflammatory diseases, the corresponding question is whether the antibody derived compound reaches a sufficient concentration in the compartment of the target cells. Bispecific molecules such as BiTE® (bispecific T cell engager) antibodies are recombinant protein constructs made of two flexibly linked antibody derived binding domains. One binding domain of BiTE® antibodies is specific for a selected tumor-associated surface antigen on target cells; the second binding domain is specific for CD3, a subunit of the T cell receptor complex on T cells. By their particular design BiTE® antibodies are uniquely suited to transiently connect T cells with target cells and, at the same time, potently activate the inherent cytolytic potential of T cells against target cells. BiTE® antibodies are small proteins with a molecular weight which allows those types of compounds to infiltrate into compartments behind the endothelial barrier via paracellular diffusion. However, the downside of small proteins such as BiTE® antibodies is a molecular weight below the renal cut-off that could likely result in a shorter half-life, a feature that BiTE® antibodies share with many other antibody formats.

[0003] An increased half-life is generally useful in in vivo applications of immunoglobulins, especially antibodies and most especially antibody fragments of small size. Although such antibody constructs based on antibody fragments (Fvs, disulphide bonded Fvs, Fabs, scFvs, dAbs) are able to rapidly reach most parts of the body, those antibody constructs are likely to suffer from rapid clearance from the body. Strategies described in the art for extending the half-life of antibody constructs such as single-chain diabodies include the conjugation of polyethylene glycol chains (PEGylation), the fusion to the IgG Fc region or to an albumin-binding domain form streptococcal protein G (see Stork 2009, JBC 284(38), p 25612). All those approaches have different issues, which must be separately addressed. The PEGylation may either be irreversible, or the process may impair the biologic activity and/or tissue distribution of the antibody construct. The fusion of a bispecific antibody construct to an IgG Fc region may result in a trifunctional molecule as described for Catumaxomab, which is able to recruit a further cell type via the Fc-FcR function. Furthermore, the fusion of an albumin-binding domain of a bacterial source may increase the immunogenicity of the antibody construct, and it is generally agreed within the art that the immunogenicity must be minimized in order to allow for a long-lasting efficacy of a protein based compound in a patient.

[0004] Thus, while it is on the one hand desirable to have a small binding molecule, since it can for example quickly reach its designated location in the body and can also reach most parts of the body, the small “size” of such a binding molecule is on the other hand not favorable as regards, in particular, renal clearance. The price for the strategy of sizing up the molecular weight of an antibody construct above the threshold for renal clearance may be the loss of appreciated tissue distribution or sterical impairment of the antibody function. Thus, it is a balancing act between small size, renal clearance, stability/functionality and tissue distribution.

### Definitions

[0005] It must be noted that as used herein, the singular forms “a”, “an”, and “the”, include plural references unless the context clearly indicates otherwise. Thus, for example, reference to “a reagent” includes one or more of such different reagents and reference to “the method” includes reference to equivalent steps and methods known to those of ordinary skill in the art that could be modified or substituted for the methods described herein.

[0006] Unless otherwise indicated, the term “at least” preceding a series of elements is to be understood to refer to every element in the series. Those skilled in the art will recognize, or be able to ascertain using no more than routine experimentation, many equivalents to the specific embodiments of the invention described herein. Such equivalents are intended to be encompassed by the present invention.

[0007] The term “and/or” wherever used herein includes the meaning of “and”, “or” and “all or any other combination of the elements connected by said term”.

[0008] The term “about” or “approximately” as used herein means within ±20%, preferably within ±15%, more preferably within ±10%, and most preferably within ±5% of a given value or range.

[0009] Throughout this specification and the claims which follow, unless the context requires otherwise, the word “comprise”, and variations such as “comprises” and “comprising”, will be understood to imply the inclusion of a stated integer or step or group of integers or steps but not the exclusion of any other integer or step or group of integer or step. When used herein the term “comprising” can be substituted with the term “containing” or “including” or sometimes when used herein with the term “having”.

[0010] When used herein “consisting of” excludes any element, step, or ingredient not specified in the claim element. When used herein, “consisting essentially of” does not exclude materials or steps that do not materially affect the basic and novel characteristics of the claim.

[0011] In each instance herein any of the terms “comprising”, “consisting essentially of” and “consisting of” may be replaced with either of the other two terms.

### DETAILED DESCRIPTION OF THE INVENTION

[0012] As described herein above, a preferred strategy to increase the distribution volume of a bispecific single chain antibody construct is the attachment of small peptide domains, which allow for the preferred tissue distribution characteristics but avoid impairing the T cell engaging function of the molecule due to steric effects. One possible approach in this context was described for spherical fluorescent recombinant protein by Sockolosky (PNAS 2012, 109(40, p 16095). This approach describes the fusion of short terminal peptide extensions binding to the neonatal Fc receptor (FcRn). The recombinant protein (mKate) used by Sockolosky were modified in order to extend the half-live of those proteins by making use of the FcRn-mediated recycling and transcytosis system. However, the use of mKate, a far-red fluorescent protein of the anemone Entacmaea quadricolor, in combination with FcRn binding peptides is a very simplified model system. In contrast to the mKate protein, a T cell engaging bispecific antibody construct is a much more complex structure, which requires for its functionality the correct formation of the binding domain to allow binding to its specific epitope. This binding is a prerequisite to engage the patients' own T cells with those cells carrying the target epitope (which is the epitope of the target binding domain), which results in the cytotoxic elimination of the target cell. Of course, an additional decisive factor for the functionality of a bispecific T cell engaging antibody construct is the question whether the construct is still producible in line with industrial standards for pharmaceutical utility. In view of the above described technical field, the problem underlying the present invention is to provide functional bispecific single chain antibody constructs which show an enhanced tissue distribution compared with the bispecific T cell engaging antibody constructs known in the art.

[0013] The present invention provides a bispecific single chain antibody construct binding to a target cell surface antigen via a first binding domain and to the T cell surface antigen CD3 via a second binding domain, the construct comprising two FcRn binding peptides, wherein:
[0014] (a) a first FcRn binding peptide comprises the amino acid sequence QRFVTGHFGGLX₁PANG (SEQ ID NO: 1) whereas X₁ is Y or H; and
[0015] (b) a second FcRn binding peptide comprises the amino acid sequence TGHFGGLHP (SEQ ID NO: 4);
   wherein the bispecific single chain antibody construct does not have an amino acid sequence as depicted in SEQ ID NOs: 132-135.

[0016] In one embodiment of the antibody construct of the invention the second FcRn binding peptide comprises the amino acid sequence QRFVTGHFGGLHPANG (SEQ ID NO: 3) or QRFCTGHFGGLHPCNG (SEQ ID NO: 5).

[0017] The term “antibody construct” refers to a molecule in which the structure and/or function is/are based on the structure and/or function of an antibody, e.g. of a full-length or whole immunoglobulin molecule. An antibody construct is hence capable of binding to its specific target or antigen. Furthermore, an antibody construct according to the invention comprises the minimum structural requirements of an antibody which allow for the target binding. This minimum requirement may e.g. be defined by the presence of at least the three light chain CDRs (i.e. CDR1, CDR2 and CDR3 of the VL region) and/or the three heavy chain CDRs (i.e. CDR1, CDR2 and CDR3 of the VH region). The antibodies on which the constructs according to the invention are based include for example monoclonal, recombinant, chimeric, deimmunized, humanized and human antibodies.

[0018] Within the definition of “antibody constructs” according to the invention are full-length or whole antibodies including camelid antibodies and other immunoglobulin antibodies generated by biotechnological or protein engineering methods or processes. These full-length antibodies may be for example monoclonal, recombinant, chimeric, deimmunized, humanized and human antibodies. Also within the definition of “antibody constructs” are fragments of full-length antibodies, such as VH, VHH, VL, (s)dAb, Fv, Fd, Fab, Fab′, F(ab′)2 or “r IgG” (“half antibody”). Antibody constructs according to the invention may also be modified fragments of antibodies, also called antibody variants, such as scFv, di-scFv or bi(s)-scFv, scFv-Fc, scFv-zipper, scFab, Fab2, Fab3, diabodies, single chain diabodies, tandem diabodies (Tandab's), tandem di-scFv, tandem tri-scFv, “minibodies” exemplified by a structure which is as follows: (VH-VL-CH3)2, (scFv-CH3)2 or (scFv-CH3-scFv)2, multibodies such as triabodies or tetrabodies, and single domain antibodies such as nanobodies or single variable domain antibodies comprising merely one variable domain, which might be VHH, VH or VL, that specifically bind an antigen or epitope independently of other V regions or domains.

[0019] Furthermore, the definition of the term “antibody constructs” includes monovalent, bivalent and polyvalent/multivalent constructs and, thus, monospecific constructs, specifically binding to only one antigenic structure, as well as bispecific and polyspecific/multispecific constructs, which specifically bind more than one antigenic structure, e.g. two, three or more, through distinct binding domains. Moreover, the definition of the term “antibody constructs” includes molecules consisting of only one polypeptide chain as well as molecules consisting of more than one polypeptide chain, which chains can be either identical (homodimers, homotrimers or homo oligomers) or different (heterodimer, heterotrimer or heterooligomer). Examples for the above identified antibodies and variants or derivatives thereof are described inter alia in Harlow and Lane, Antibodies a laboratory manual, CSHL Press (1988) and Using Antibodies: a laboratory manual, CSHL Press (1999), Kontermann and Dübel, Antibody Engineering, Springer, 2nd ed. 2010 and Little, Recombinant Antibodies for Immunotherapy, Cambridge University Press 2009.

[0020] The antibody constructs of the present invention are preferably “in vitro generated antibody constructs”. This term refers to an antibody construct according to the above definition where all or part of the variable region (e.g., at least one CDR) is generated in a non-immune cell selection, e.g., an in vitro phage display, protein chip or any other method in which candidate sequences can be tested for their ability to bind to an antigen. This term thus preferably excludes sequences generated solely by genomic rearrangement in an immune cell in an animal. A “recombinant antibody” is an antibody made through the use of recombinant DNA technology or genetic engineering.

[0021] The present invention is directed to “single chain antibody constructs”. Accordingly, those single chain antibody constructs only include those embodiments of the above described antibody constructs which consist of a single polypeptide chain.

[0022] The term “monoclonal antibody” (mAb) or monoclonal antibody construct as used herein refers to an antibody obtained from a population of substantially homogeneous antibodies, i.e., the individual antibodies comprising the population are identical except for possible naturally occurring mutations and/or post-translation modifications (e.g., isomerizations, amidations) that may be present in minor amounts. Monoclonal antibodies are highly specific, being directed against a single antigenic site or determinant on the antigen, in contrast to conventional (polyclonal) antibody preparations which typically include different antibodies directed against different determinants (or epitopes). In addition to their specificity, the monoclonal antibodies are advantageous in that they are synthesized by the hybridoma culture, hence uncontaminated by other immunoglobulins. The modifier “monoclonal” indicates the character of the antibody as being obtained from a substantially homogeneous population of antibodies, and is not to be construed as requiring production of the antibody by any particular method.

[0023] For the preparation of monoclonal antibodies, any technique providing antibodies produced by continuous cell line cultures can be used. For example, monoclonal antibodies to be used may be made by the hybridoma method first described by Koehler et al., Nature, 256: 495 (1975), or may be made by recombinant DNA methods (see, e.g., U.S. Pat. No. 4,816,567). Examples for further techniques to produce human monoclonal antibodies include the trioma technique, the human B-cell hybridoma technique (Kozbor, Immunology Today 4 (1983), 72) and the EBV-hybridoma technique (Cole et al., Monoclonal Antibodies and Cancer Therapy, Alan R. Liss, Inc. (1985), 77-96).

[0024] Hybridomas can then be screened using standard methods, such as enzyme-linked immunosorbant assay (ELISA) and surface plasmon resonance (BIACORE™) analysis, to identify one or more hybridomas that produce an antibody that specifically binds with a specified antigen. Any form of the relevant antigen may be used as the immunogen, e.g., recombinant antigen, naturally occurring forms, any variants or fragments thereof, as well as an antigenic peptide thereof. Surface plasmon resonance as employed in the BIAcore system can be used to increase the efficiency of phage antibodies which bind to an epitope of a target antigen, such as the target cell surface antigen or CD3 epsilon (Schier, Human Antibodies Hybridomas 7 (1996), 97-105; Malmborg, J. Immunol. Methods 183 (1995), 7-13). Another exemplary method of making monoclonal antibodies includes screening protein expression libraries, e.g., phage display or ribosome display libraries. Phage display is described, for example, in Ladner et al., U.S. Pat. No. 5,223,409; Smith (1985) Science 228:1315-1317, Clackson et al., Nature, 352: 624-628 (1991) and Marks et al., J. Mol. Biol., 222: 581-597 (1991).

[0025] In addition to the use of display libraries, the relevant antigen can be used to immunize a non-human animal, e.g., a rodent (such as a mouse, hamster, rabbit or rat). In one embodiment, the non-human animal includes at least a part of a human immunoglobulin gene. For example, it is possible to engineer mouse strains deficient in mouse antibody production with large fragments of the human Ig (immunoglobulin) loci. Using the hybridoma technology, antigen-specific monoclonal antibodies derived from the genes with the desired specificity may be produced and selected. See, e.g., XENOMOUSE™, Green et al. (1994) Nature Genetics 7:13-21, US 2003-0070185, WO 96/34096, and WO96/33735.

[0026] A monoclonal antibody can also be obtained from a non-human animal, and then modified, e.g., humanized, deimmunized, rendered chimeric etc., using recombinant DNA techniques known in the art. Examples of modified antibody constructs include humanized variants of non-human antibodies, “affinity matured” antibodies (see, e.g. Hawkins et al. J. Mol. Biol. 254, 889-896 (1992) and Lowman et al., Biochemistry 30, 10832-10837 (1991)) and antibody mutants with altered effector function(s) (see, e.g., U.S. Pat. No. 5,648,260, Kontermann and Dubel (2010), loc. cit. and Little (2009), loc. cit.).

[0027] In immunology, affinity maturation is the process by which B cells produce antibodies with increased affinity for antigen during the course of an immune response. With repeated exposures to the same antigen, a host will produce antibodies of successively greater affinities. Like the natural prototype, the in vitro affinity maturation is based on the principles of mutation and selection. The in vitro affinity maturation has successfully been used to optimize antibodies, antibody constructs, and antibody fragments. Random mutations inside the CDRs are introduced using radiation, chemical mutagens or error-prone PCR. In addition, the genetical diversity can be increased by chain shuffling. Two or three rounds of mutation and selection using display methods like phage display usually results in antibody fragments with affinities in the low nanomolar range.

[0028] A preferred type of an amino acid substitutional variation of the antibody constructs involves substituting one or more hypervariable region residues of a parent antibody (e. g. a humanized or human antibody). Generally, the resulting variant(s) selected for further development will have improved biological properties relative to the parent antibody from which they are generated. A convenient way for generating such substitutional variants involves affinity maturation using phage display. Briefly, several hypervariable region sites (e. g. 6-7 sites) are mutated to generate all possible amino acid substitutions at each site. The antibody variants thus generated are displayed in a monovalent fashion from filamentous phage particles as fusions to the gene III product of M13 packaged within each particle. The phage-displayed variants are then screened for their biological activity (e. g. binding affinity) as herein disclosed. In order to identify candidate hypervariable region sites for modification, alanine scanning mutagenesis can be performed to identify hypervariable region residues contributing significantly to antigen binding. Alternatively, or additionally, it may be beneficial to analyze a crystal structure of the antigen-antibody complex to identify contact points between the binding domain and, e.g., human the target cell surface antigen. Such contact residues and neighbouring residues are candidates for substitution according to the techniques elaborated herein. Once such variants are generated, the panel of variants is subjected to screening as described herein and antibodies with superior properties in one or more relevant assays may be selected for further development.

[0029] The monoclonal antibodies and antibody constructs of the present invention specifically include “chimeric” antibodies (immunoglobulins) in which a portion of the heavy and/or light chain is identical with or homologous to corresponding sequences in antibodies derived from a particular species or belonging to a particular antibody class or subclass, while the remainder of the chain(s) is/are identical with or homologous to corresponding sequences in antibodies derived from another species or belonging to another antibody class or subclass, as well as fragments of such antibodies, so long as they exhibit the desired biological activity (U.S. Pat. No. 4,816,567; Morrison et al., Proc. Natl. Acad. Sci. USA, 81: 6851-6855 (1984)). Chimeric antibodies of interest herein include “primitized” antibodies comprising variable domain antigen-binding sequences derived from a non-human primate (e.g., Old World Monkey, Ape etc.) and human constant region sequences. A variety of approaches for making chimeric antibodies have been described. See e.g., Morrison et al., Proc. Natl. Acad. ScL U.S.A. 81:6851, 1985; Takeda et al., Nature 314:452, 1985, Cabilly et al., U.S. Pat. No. 4,816,567; Boss et al., U.S. Pat. No. 4,816,397; Tanaguchi et al., EP 0171496; EP 0173494; and GB 2177096.

[0030] An antibody, antibody construct or antibody fragment may also be modified by specific deletion of human T cell epitopes (a method called “deimmunization”) by the methods disclosed in WO 98/52976 and WO 00/34317. Briefly, the heavy and light chain variable domains of an antibody can be analyzed for peptides that bind to MHC class II; these peptides represent potential T cell epitopes (as defined in WO 98/52976 and WO 00/34317). For detection of potential T cell epitopes, a computer modeling approach termed “peptide threading” can be applied, and in addition a database of human MHC class II binding peptides can be searched for motifs present in the VH and VL sequences, as described in WO 98/52976 and WO 00/34317. These motifs bind to any of the 18 major MHC class II DR allotypes, and thus constitute potential T cell epitopes. Potential T cell epitopes detected can be eliminated by substituting small numbers of amino acid residues in the variable domains, or preferably, by single amino acid substitutions. Typically, conservative substitutions are made. Often, but not exclusively, an amino acid common to a position in human germline antibody sequences may be used. Human germline sequences are disclosed e.g. in Tomlinson, et al. (1992) J. Mol. Biol. 227:776-798; Cook, G. P. et al. (1995) Immunol. Today Vol. 16 (5): 237-242; and Tomlinson et al. (1995) EMBO J. 14: 14:4628-4638. The V BASE directory provides a comprehensive directory of human immunoglobulin variable region sequences (compiled by Tomlinson, L A. et al. MRC Centre for Protein Engineering, Cambridge, UK). These sequences can be used as a source of human sequence, e.g., for framework regions and CDRs. Consensus human framework regions can also be used, for example as described in U.S. Pat. No. 6,300,064.

[0031] “Humanized” antibodies, antibody constructs or fragments thereof (such as Fv, Fab, Fab′, F(ab′)2 or other antigen-binding subsequences of antibodies) are antibodies or immunoglobulins of mostly human sequences, which contain (a) minimal sequence(s) derived from non-human immunoglobulin. For the most part, humanized antibodies are human immunoglobulins (recipient antibody) in which residues from a hypervariable region (also CDR) of the recipient are replaced by residues from a hypervariable region of a non-human (e.g., rodent) species (donor antibody) such as mouse, rat, hamster or rabbit having the desired specificity, affinity, and capacity. In some instances, Fv framework region (FR) residues of the human immunoglobulin are replaced by corresponding non-human residues. Furthermore, “humanized antibodies” as used herein may also comprise residues which are found neither in the recipient antibody nor the donor antibody. These modifications are made to further refine and optimize antibody performance. The humanized antibody may also comprise at least a portion of an immunoglobulin constant region (Fc), typically that of a human immunoglobulin. For further details, see Jones et al., Nature, 321: 522-525 (1986); Reichmann et al., Nature, 332: 323-329 (1988); and Presta, Curr. Op. Struct. Biol., 2: 593-596 (1992).

[0032] Humanized antibodies or fragments thereof can be generated by replacing sequences of the Fv variable domain that are not directly involved in antigen binding with equivalent sequences from human Fv variable domains. Exemplary methods for generating humanized antibodies or fragments thereof are provided by Morrison (1985) Science 229:1202-1207; by Oi et al. (1986) BioTechniques 4:214; and by U.S. Pat. No. 5,585,089; U.S. Pat. No. 5,693,761; U.S. Pat. No. 5,693,762; U.S. Pat. No. 5,859,205; and U.S. Pat. No. 6,407,213. Those methods include isolating, manipulating, and expressing the nucleic acid molecules that encode all or part of immunoglobulin Fv variable domains from at least one of a heavy or light chain. Such nucleic acids may be obtained from a hybridoma producing an antibody against a predetermined target, as described above, as well as from other sources. The recombinant DNA encoding the humanized antibody molecule can then be cloned into an appropriate expression vector.

[0033] Humanized antibodies may also be produced using transgenic animals such as mice that express human heavy and light chain genes, but are incapable of expressing the endogenous mouse immunoglobulin heavy and light chain genes. Winter describes an exemplary CDR grafting method that may be used to prepare the humanized antibodies described herein (U.S. Pat. No. 5,225,539). All of the CDRs of a particular human antibody may be replaced with at least a portion of a non-human CDR, or only some of the CDRs may be replaced with non-human CDRs. It is only necessary to replace the number of CDRs required for binding of the humanized antibody to a predetermined antigen.

[0034] A humanized antibody can be optimized by the introduction of conservative substitutions, consensus sequence substitutions, germline substitutions and/or back mutations. Such altered immunoglobulin molecules can be made by any of several techniques known in the art, (e.g., Teng et al., Proc. Natl. Acad. Sci. U.S.A., 80: 7308-7312, 1983; Kozbor et al., Immunology Today, 4: 7279, 1983; Olsson et al., Meth. Enzymol., 92: 3-16, 1982, and EP 239 400.

[0035] The term “human antibody”, “human antibody construct” and “human binding domain” includes antibodies, antibody constructs and binding domains having antibody regions such as variable and constant regions or domains which correspond substantially to human germline immunoglobulin sequences known in the art, including, for example, those described by Kabat et al. (1991) (loc. cit.). The human antibodies, antibody constructs or binding domains of the invention may include amino acid residues not encoded by human germline immunoglobulin sequences (e.g., mutations introduced by random or site-specific mutagenesis in vitro or by somatic mutation in vivo), for example in the CDRs, and in particular, in CDR3. The human antibodies, antibody constructs or binding domains can have at least one, two, three, four, five, or more positions replaced with an amino acid residue that is not encoded by the human germline immunoglobulin sequence. The definition of human antibodies, antibody constructs and binding domains as used herein also contemplates fully human antibodies, which include only non-artificially and/or genetically altered human sequences of antibodies as those can be derived by using technologies or systems such as the Xenomouse.

[0036] In some embodiments, the antibody constructs of the invention are “isolated” or “substantially pure” antibody constructs. “Isolated” or “substantially pure” when used to describe the antibody construct disclosed herein means an antibody construct that has been identified, separated and/or recovered from a component of its production environment. Preferably, the antibody construct is free or substantially free of association with all other components from its production environment. Contaminant components of its production environment, such as that resulting from recombinant transfected cells, are materials that would typically interfere with diagnostic or therapeutic uses for the polypeptide, and may include enzymes, hormones, and other proteinaceous or non-proteinaceous solutes. The antibody constructs may e.g constitute at least about 5%, or at least about 50% by weight of the total protein in a given sample. It is understood that the isolated protein may constitute from 5% to 99.9% by weight of the total protein content, depending on the circumstances. The polypeptide may be made at a significantly higher concentration through the use of an inducible promoter or high expression promoter, such that it is made at increased concentration levels. The definition includes the production of an antibody construct in a wide variety of organisms and/or host cells that are known in the art. In preferred embodiments, the antibody construct will be purified (1) to a degree sufficient to obtain at least 15 residues of N-terminal or internal amino acid sequence by use of a spinning cup sequenator, or (2) to homogeneity by SDS-PAGE under non-reducing or reducing conditions using Coomassie blue or, preferably, silver stain. Ordinarily, however, an isolated antibody construct will be prepared by at least one purification step.

[0037] The term “binding domain” characterizes in connection with the present invention a domain which (specifically) binds to/interacts with/recognizes a given target epitope or a given target site on the target molecules (antigens) and CD3, respectively. The structure and function of the first binding domain (recognizing the target cell surface antigen), and preferably also the structure and/or function of the second binding domain (CD3), is/are based on the structure and/or function of an antibody, e.g. of a full-length or whole immunoglobulin molecule. According to the invention, the first binding domain is characterized by the presence of three light chain CDRs (i.e. CDR1, CDR2 and CDR3 of the VL region) and three heavy chain CDRs (i.e. CDR1, CDR2 and CDR3 of the VH region). The second binding domain preferably also comprises the minimum structural requirements of an antibody which allow for the target binding. More preferably, the second binding domain comprises at least three light chain CDRs (i.e. CDR1, CDR2 and CDR3 of the VL region) and/or three heavy chain CDRs (i.e. CDR1, CDR2 and CDR3 of the VH region). It is envisaged that the first and/or second binding domain is produced by or obtainable by phage-display or library screening methods rather than by grafting CDR sequences from a pre-existing (monoclonal) antibody into a scaffold.

[0038] According to the present invention, binding domains are preferably in the form of polypeptides. Such polypeptides may include proteinaceous parts and non-proteinaceous parts (e.g. chemical linkers or chemical cross-linking agents such as glutaraldehyde). Proteins (including fragments thereof, preferably biologically active fragments, and peptides, usually having less than 30 amino acids) comprise two or more amino acids coupled to each other via a covalent peptide bond (resulting in a chain of amino acids). The term “polypeptide” as used herein describes a group of molecules, which usually consist of more than 30 amino acids. Polypeptides may further form multimers such as dimers, trimers and higher oligomers, i.e. consisting of more than one polypeptide molecule. Polypeptide molecules forming such dimers, trimers etc. may be identical or non-identical. The corresponding higher order structures of such multimers are, consequently, termed homo- or heterodimers, homo- or heterotrimers etc. An example for a hereteromultimer is an antibody molecule, which, in its naturally occurring form, consists of two identical light polypeptide chains and two identical heavy polypeptide chains. The terms “peptide”, “polypeptide” and “protein” also refer to naturally modified peptides/polypeptides/proteins wherein the modification is effected e.g. by post-translational modifications like glycosylation, acetylation, phosphorylation and the like. A “peptide”, “polypeptide” or “protein” when referred to herein may also be chemically modified such as pegylated. Such modifications are well known in the art and described herein below.

[0039] As mentioned above, a binding domain may typically comprise an antibody light chain variable region (VL) and an antibody heavy chain variable region (VH); however, it does not have to comprise both. Fd fragments, for example, have two VH regions and often retain some antigen-binding function of the intact antigen-binding domain. Examples of (modified) antigen-binding antibody fragments include (1) a Fab fragment, a monovalent fragment having the VL, VH, CL and CH1 domains; (2) a F(ab′)2 fragment, a bivalent fragment having two Fab fragments linked by a disulfide bridge at the hinge region; (3) an Fd fragment having the two VH and CH1 domains; (4) an Fv fragment having the VL and VH domains of a single arm of an antibody, (5) a dAb fragment (Ward et al., (1989) Nature 341:544-546), which has a VH domain; (6) an isolated complementarity determining region (CDR), and (7) a single chain Fv (scFv), the latter being preferred (for example, derived from an scFV library).

[0040] Antibodies and antibody constructs comprising at least one human binding domain avoid some of the problems associated with antibodies or antibody constructs that possess non-human such as rodent (e.g. murine, rat, hamster or rabbit) variable and/or constant regions. The presence of such rodent derived proteins can lead to the rapid clearance of the antibodies or antibody constructs or can lead to the generation of an immune response against the antibody or antibody construct by a patient. In order to avoid the use of rodent derived antibodies or antibody constructs, human or fully human antibodies/antibody constructs can be generated through the introduction of human antibody function into a rodent so that the rodent produces fully human antibodies.

[0041] The ability to clone and reconstruct megabase-sized human loci in YACs and to introduce them into the mouse germline provides a powerful approach to elucidating the functional components of very large or crudely mapped loci as well as generating useful models of human disease. Furthermore, the use of such technology for substitution of mouse loci with their human equivalents could provide unique insights into the expression and regulation of human gene products during development, their communication with other systems, and their involvement in disease induction and progression.

[0042] An important practical application of such a strategy is the “humanization” of the mouse humoral immune system. Introduction of human immunoglobulin (Ig) loci into mice in which the endogenous Ig genes have been inactivated offers the opportunity to study the mechanisms underlying programmed expression and assembly of antibodies as well as their role in B-cell development. Furthermore, such a strategy could provide an ideal source for production of fully human monoclonal antibodies (mAbs)—an important milestone towards fulfilling the promise of antibody therapy in human disease. Fully human antibodies or antibody constructs are expected to minimize the immunogenic and allergic responses intrinsic to mouse or mouse-derivatized mAbs and thus to increase the efficacy and safety of the administered antibodies/antibody constructs. The use of fully human antibodies or antibody constructs can be expected to provide a substantial advantage in the treatment of chronic and recurring human diseases, such as inflammation, autoimmunity, and cancer, which require repeated compound administrations.

[0043] One approach towards this goal was to engineer mouse strains deficient in mouse antibody production with large fragments of the human Ig loci in anticipation that such mice would produce a large repertoire of human antibodies in the absence of mouse antibodies. Large human Ig fragments would preserve the large variable gene diversity as well as the proper regulation of antibody production and expression. By exploiting the mouse machinery for antibody diversification and selection and the lack of immunological tolerance to human proteins, the reproduced human antibody repertoire in these mouse strains should yield high affinity antibodies against any antigen of interest, including human antigens. Using the hybridoma technology, antigen-specific human mAbs with the desired specificity could be readily produced and selected. This general strategy was demonstrated in connection with the generation of the first XenoMouse mouse strains (see Green et al. Nature Genetics 7:13-21 (1994)). The XenoMouse strains were engineered with yeast artificial chromosomes (YACs) containing 245 kb and 190 kb-sized germline configuration fragments of the human heavy chain locus and kappa light chain locus, respectively, which contained core variable and constant region sequences. The human Ig containing YACs proved to be compatible with the mouse system for both rearrangement and expression of antibodies and were capable of substituting for the inactivated mouse Ig genes. This was demonstrated by their ability to induce B cell development, to produce an adult-like human repertoire of fully human antibodies, and to generate antigen-specific human mAbs. These results also suggested that introduction of larger portions of the human Ig loci containing greater numbers of V genes, additional regulatory elements, and human Ig constant regions might recapitulate substantially the full repertoire that is characteristic of the human humoral response to infection and immunization. The work of Green et al. was recently extended to the introduction of greater than approximately 80% of the human antibody repertoire through introduction of megabase sized, germline configuration YAC fragments of the human heavy chain loci and kappa light chain loci, respectively. See Mendez et al. Nature Genetics 15:146-156 (1997) and U.S. patent application Ser. No. 08/759,620.

[0044] The production of the XenoMouse mice is further discussed and delineated in U.S. patent application Ser. No. 07/466,008, Ser. No. 07/610,515, Ser. No. 07/919,297, Ser. No. 07/922,649, Ser. No. 08/031,801, Ser. No. 08/112,848, Ser. No. 08/234,145, Ser. No. 08/376,279, Ser. No. 08/430,938, Ser. No. 08/464,584, Ser. No. 08/464,582, Ser. No. 08/463,191, Ser. No. 08/462,837, Ser. No. 08/486,853, Ser. No. 08/486,857, Ser. No. 08/486,859, Ser. No. 08/462,513, Ser. No. 08/724,752, and Ser. No. 08/759,620; and U.S. Pat. Nos. 6,162,963, 6,150,584, 6,114,598, 6,075,181, and 5,939,598 and Japanese Patent Nos. 3 068 180 B2, 3 068 506 B2, and 3 068 507 B2. See also Mendez et al. Nature Genetics 15:146-156 (1997) and Green and Jakobovits J. Exp. Med. 188:483-495 (1998), EP 0 463 151 B1, WO 94/02602, WO 96/34096, WO 98/24893, WO 00/76310, and WO 03/47336.

[0045] In an alternative approach, others, including GenPharm International, Inc., have utilized a “minilocus” approach. In the minilocus approach, an exogenous Ig locus is mimicked through the inclusion of pieces (individual genes) from the Ig locus. Thus, one or more VH genes, one or more DH genes, one or more JH genes, a mu constant region, and a second constant region (preferably a gamma constant region) are formed into a construct for insertion into an animal. This approach is described in U.S. Pat. No. 5,545,807 to Surani et al. and U.S. Pat. Nos. 5,545,806, 5,625,825, 5,625,126, 5,633,425, 5,661,016, 5,770,429, 5,789,650, 5,814,318, 5,877,397, 5,874,299, and 6,255,458 each to Lonberg and Kay, U.S. Pat. Nos. 5,591,669 and 6,023,010 to Krimpenfort and Berns, U.S. Pat. Nos. 5,612,205, 5,721,367, and 5,789,215 to Berns et al., and U.S. Pat. No. 5,643,763 to Choi and Dunn, and GenPharm International U.S. patent application Ser. No. 07/574,748, Ser. No. 07/575,962, Ser. No. 07/810,279, Ser. No. 07/853,408, Ser. No. 07/904,068, Ser. No. 07/990,860, Ser. No. 08/053,131, Ser. No. 08/096,762, Ser. No. 08/155,301, Ser. No. 08/161,739, Ser. No. 08/165,699, Ser. No. 08/209,741. See also EP 0 546 073 B1, WO 92/03918, WO 92/22645, WO 92/22647, WO 92/22670, WO 93/12227, WO 94/00569, WO 94/25585, WO 96/14436, WO 97/13852, and WO 98/24884 and U.S. Pat. No. 5,981,175. See further Taylor et al. (1992), Chen et al. (1993), Tuaillon et al. (1993), Choi et al. (1993), Lonberg et al. (1994), Taylor et al. (1994), and Tuaillon et al. (1995), Fishwild et al. (1996).

[0046] Kirin has also demonstrated the generation of human antibodies from mice in which, through microcell fusion, large pieces of chromosomes, or entire chromosomes, have been introduced. See European Patent Application Nos. 773 288 and 843 961. Xenerex Biosciences is developing a technology for the potential generation of human antibodies. In this technology, SCID mice are reconstituted with human lymphatic cells, e.g., B and/or T cells. Mice are then immunized with an antigen and can generate an immune response against the antigen. See U.S. Pat. Nos. 5,476,996; 5,698,767; and 5,958,765.

[0047] Human anti-mouse antibody (HAMA) responses have led the industry to prepare chimeric or otherwise humanized antibodies. It is however expected that certain human anti-chimeric antibody (HACA) responses will be observed, particularly in chronic or multi-dose utilizations of the antibody. Thus, it would be desirable to provide antibody constructs comprising a fully human binding domain against the target cell surface antigen and a fully human binding domain against CD3 in order to vitiate concerns and/or effects of HAMA or HACA response.

[0048] The terms “(specifically) binds to”, (specifically) recognizes”, “is (specifically) directed to”, and “(specifically) reacts with” mean in accordance with this invention that a binding domain interacts or specifically interacts with one or more, preferably at least two, more preferably at least three and most preferably at least four amino acids of an epitope located on the target protein or antigen (the target cell surface antigen/CD3).

[0049] The term “epitope” refers to a site on an antigen to which a binding domain, such as an antibody or immunoglobulin or derivative or fragment of an antibody or of an immunoglobulin, specifically binds. An “epitope” is antigenic and thus the term epitope is sometimes also referred to herein as “antigenic structure” or “antigenic determinant”. Thus, the binding domain is an “antigen interaction site”. Said binding/interaction is also understood to define a “specific recognition”.

[0050] “Epitopes” can be formed both by contiguous amino acids or non-contiguous amino acids juxtaposed by tertiary folding of a protein. A “linear epitope” is an epitope where an amino acid primary sequence comprises the recognized epitope. A linear epitope typically includes at least 3 or at least 4, and more usually, at least 5 or at least 6 or at least 7, for example, about 8 to about 10 amino acids in a unique sequence.

[0051] A “conformational epitope”, in contrast to a linear epitope, is an epitope wherein the primary sequence of the amino acids comprising the epitope is not the sole defining component of the epitope recognized (e.g., an epitope wherein the primary sequence of amino acids is not necessarily recognized by the binding domain). Typically a conformational epitope comprises an increased number of amino acids relative to a linear epitope. With regard to recognition of conformational epitopes, the binding domain recognizes a three-dimensional structure of the antigen, preferably a peptide or protein or fragment thereof (in the context of the present invention, the antigen for one of the binding domains is comprised within the target cell surface antigen protein). For example, when a protein molecule folds to form a three-dimensional structure, certain amino acids and/or the polypeptide backbone forming the conformational epitope become juxtaposed enabling the antibody to recognize the epitope. Methods of determining the conformation of epitopes include, but are not limited to, x-ray crystallography, two-dimensional nuclear magnetic resonance (2D-NMR) spectroscopy and site-directed spin labelling and electron paramagnetic resonance (EPR) spectroscopy.

[0052] The interaction between the binding domain and the epitope or epitope cluster implies that a binding domain exhibits appreciable affinity for the epitope or epitope cluster on a particular protein or antigen (here: the target cell surface antigen and CD3, respectively) and, generally, does not exhibit significant reactivity with proteins or antigens other than the target cell surface antigen or CD3. “Appreciable affinity” includes binding with an affinity of about 10⁻⁶ M (KD) or stronger. Preferably, binding is considered specific when the binding affinity is about 10⁻¹² to 10⁻⁸ M, 10⁻¹² to 10⁻⁹ M, 10⁻¹² to 10⁻¹⁹ M, 10⁻¹¹ to 10⁻⁸ M, preferably of about 10⁻¹¹ to 10⁻⁹ M. Whether a binding domain specifically reacts with or binds to a target can be tested readily by, inter alia, comparing the reaction of said binding domain with a target protein or antigen with the reaction of said binding domain with proteins or antigens other than the target cell surface antigen or CD3. Preferably, a binding domain of the invention does not essentially or substantially bind to proteins or antigens other than the target cell surface antigen or CD3 (i.e., the first binding domain is not capable of binding to proteins other than the target cell surface antigen and the second binding domain is not capable of binding to proteins other than CD3).

[0053] The term “does not essentially/substantially bind” or “is not capable of binding” means that a binding domain of the present invention does not bind a protein or antigen other than the target cell surface antigen or CD3, i.e., does not show reactivity of more than 30%, preferably not more than 20%, more preferably not more than 10%, particularly preferably not more than 9%, 8%, 7%, 6% or 5% with proteins or antigens other than the target cell surface antigen or CD3, whereby binding to the target cell surface antigen or CD3, respectively, is set to be 100%.

[0054] Specific binding is believed to be effected by specific motifs in the amino acid sequence of the binding domain and the antigen. Thus, binding is achieved as a result of their primary, secondary and/or tertiary structure as well as the result of secondary modifications of said structures. The specific interaction of the antigen-interaction-site with its specific antigen may result in a simple binding of said site to the antigen. Moreover, the specific interaction of the antigen-interaction-site with its specific antigen may alternatively or additionally result in the initiation of a signal, e.g. due to the induction of a change of the conformation of the antigen, an oligomerization of the antigen, etc.

[0055] The term “variable” refers to the portions of the antibody or immunoglobulin domains that exhibit variability in their sequence and that are involved in determining the specificity and binding affinity of a particular antibody (i.e., the “variable domain(s)”). The pairing of a variable heavy chain (VH) and a variable light chain (VL) together forms a single antigen-binding site. The CH domain most proximal to VH is designated as CH1. Each light (L) chain is linked to a heavy (H) chain by one covalent disulfide bond, while the two H chains are linked to each other by one or more disulfide bonds depending on the H chain isotype.

[0056] Variability is not evenly distributed throughout the variable domains of antibodies; it is concentrated in sub-domains of each of the heavy and light chain variable regions. These sub-domains are called “hypervariable regions” or “complementarity determining regions” (CDRs). The more conserved (i.e., non-hypervariable) portions of the variable domains are called the “framework” regions (FRM) and provide a scaffold for the six CDRs in three dimensional space to form an antigen-binding surface. The variable domains of naturally occurring heavy and light chains each comprise four FRM regions (FR1, FR2, FR3, and FR4), largely adopting a β-sheet configuration, connected by three hypervariable regions, which form loops connecting, and in some cases forming part of, the β-sheet structure. The hypervariable regions in each chain are held together in close proximity by the FRM and, with the hypervariable regions from the other chain, contribute to the formation of the antigen-binding site (see Kabat et al., loc. cit.). The constant domains are not directly involved in antigen binding, but exhibit various effector functions, such as, for example, antibody-dependent, cell-mediated cytotoxicity and complement activation.

[0057] The terms “CDR”, and its plural “CDRs”, refer to the complementarity determining region of which three make up the binding character of a light chain variable region (CDR-L1, CDR-L2 and CDR-L3) and three make up the binding character of a heavy chain variable region (CDR-H1, CDR-H2 and CDR-H3). CDRs contain most of the residues responsible for specific interactions of the antibody with the antigen and hence contribute to the functional activity of an antibody molecule: they are the main determinants of antigen specificity.

[0058] The exact definitional CDR boundaries and lengths are subject to different classification and numbering systems. CDRs may therefore be referred to by Kabat, Chothia, contact or any other boundary definitions, including the numbering system described herein. Despite differing boundaries, each of these systems has some degree of overlap in what constitutes the so called “hypervariable regions” within the variable sequences. CDR definitions according to these systems may therefore differ in length and boundary areas with respect to the adjacent framework region. See for example Kabat (an approach based on cross-species sequence variability), Chothia (an approach based on crystallographic studies of antigen-antibody complexes), and/or MacCallum (Kabat et al., loc. cit.; Chothia et al., J. Mol. Biol, 1987, 196: 901-917; and MacCallum et al., J. Mol. Biol, 1996, 262: 732). Still another standard for characterizing the antigen binding site is the AbM definition used by Oxford Molecular's AbM antibody modeling software. See, e.g., Protein Sequence and Structure Analysis of Antibody Variable Domains. In: Antibody Engineering Lab Manual (Ed.: Duebel, S. and Kontermann, R., Springer-Verlag, Heidelberg). To the extent that two residue identification techniques define regions of overlapping, but not identical regions, they can be combined to define a hybrid CDR. However, the numbering in accordance with the so-called Kabat system is preferred.

[0059] Typically, CDRs form a loop structure that can be classified as a canonical structure. The term “canonical structure” refers to the main chain conformation that is adopted by the antigen binding (CDR) loops. From comparative structural studies, it has been found that five of the six antigen binding loops have only a limited repertoire of available conformations. Each canonical structure can be characterized by the torsion angles of the polypeptide backbone. Correspondent loops between antibodies may, therefore, have very similar three dimensional structures, despite high amino acid sequence variability in most parts of the loops (Chothia and Lesk, J. Mol. Biol., 1987, 196: 901; Chothia et al., Nature, 1989, 342: 877; Martin and Thornton, J. Mol. Biol, 1996, 263: 800). Furthermore, there is a relationship between the adopted loop structure and the amino acid sequences surrounding it. The conformation of a particular canonical class is determined by the length of the loop and the amino acid residues residing at key positions within the loop, as well as within the conserved framework (i.e., outside of the loop). Assignment to a particular canonical class can therefore be made based on the presence of these key amino acid residues.

[0060] The term “canonical structure” may also include considerations as to the linear sequence of the antibody, for example, as catalogued by Kabat (Kabat et al., loc. cit.). The Kabat numbering scheme (system) is a widely adopted standard for numbering the amino acid residues of an antibody variable domain in a consistent manner and is the preferred scheme applied in the present invention as also mentioned elsewhere herein. Additional structural considerations can also be used to determine the canonical structure of an antibody. For example, those differences not fully reflected by Kabat numbering can be described by the numbering system of Chothia et al and/or revealed by other techniques, for example, crystallography and two- or three-dimensional computational modeling. Accordingly, a given antibody sequence may be placed into a canonical class which allows for, among other things, identifying appropriate chassis sequences (e.g., based on a desire to include a variety of canonical structures in a library). Kabat numbering of antibody amino acid sequences and structural considerations as described by Chothia et al., loc. cit. and their implications for construing canonical aspects of antibody structure, are described in the literature. The subunit structures and three-dimensional configurations of different classes of immunoglobulins are well known in the art. For a review of the antibody structure, see Antibodies: A Laboratory Manual, Cold Spring Harbor Laboratory, eds. Harlow et al., 1988.

[0061] The CDR3 of the light chain and, particularly, the CDR3 of the heavy chain may constitute the most important determinants in antigen binding within the light and heavy chain variable regions. In some antibody constructs, the heavy chain CDR3 appears to constitute the major area of contact between the antigen and the antibody. In vitro selection schemes in which CDR3 alone is varied can be used to vary the binding properties of an antibody or determine which residues contribute to the binding of an antigen. Hence, CDR3 is typically the greatest source of molecular diversity within the antibody-binding site. H3, for example, can be as short as two amino acid residues or greater than 26 amino acids.

[0062] The sequence of antibody genes after assembly and somatic mutation is highly varied, and these varied genes are estimated to encode 10¹⁰ different antibody molecules (Immunoglobulin Genes, 2^{nd} ed., eds. Jonio et al., Academic Press, San Diego, Calif., 1995). Accordingly, the immune system provides a repertoire of immunoglobulins. The term “repertoire” refers to at least one nucleotide sequence derived wholly or partially from at least one sequence encoding at least one immunoglobulin. The sequence(s) may be generated by rearrangement in vivo of the V, D, and J segments of heavy chains, and the V and J segments of light chains. Alternatively, the sequence(s) can be generated from a cell in response to which rearrangement occurs, e.g., in vitro stimulation. Alternatively, part or all of the sequence(s) may be obtained by DNA splicing, nucleotide synthesis, mutagenesis, and other methods, see, e.g., U.S. Pat. No. 5,565,332. A repertoire may include only one sequence or may include a plurality of sequences, including ones in a genetically diverse collection.

[0063] The term “bispecific” as used herein refers to an antibody construct which is “at least bispecific”, i.e., it comprises at least a first binding domain and a second binding domain, wherein the first binding domain binds to one antigen or target, and the second binding domain binds to another antigen or target (here: CD3). Accordingly, antibody constructs according to the invention comprise specificities for at least two different antigens or targets. The term “bispecific antibody construct” of the invention also encompasses multispecific antibody constructs such as trispecific antibody constructs, the latter ones including three binding domains, or constructs having more than three (e.g. four, five . . . ) specificities.

[0064] Given that the antibody constructs according to the invention are (at least) bispecific, they do not occur naturally and they are markedly different from naturally occurring products. A “bispecific” antibody construct or immunoglobulin is hence an artificial hybrid antibody or immunoglobulin having at least two distinct binding sites with different specificities. Bispecific antibodies can be produced by a variety of methods including fusion of hybridomas or linking of Fab′ fragments. See, e.g., Songsivilai & Lachmann, Clin. Exp. Immunol. 79:315-321 (1990).

[0065] The at least two binding domains and the variable domains of the antibody construct of the present invention may or may not comprise peptide linkers (spacer peptides). The term “peptide linker” defines in accordance with the present invention an amino acid sequence by which the amino acid sequences of one (variable and/or binding) domain and another (variable and/or binding) domain of the antibody construct of the invention are linked with each other. An essential technical feature of such peptide linker is that said peptide linker does not comprise any polymerization activity. Among the suitable peptide linkers are those described in U.S. Pat. Nos. 4,751,180 and 4,935,233 or WO 88/09344.

[0066] In the event that a linker is used, this linker is preferably of a length and sequence sufficient to ensure that each of the first and second domains can, independently from one another, retain their differential binding specificities. For peptide linkers which connect the at least two binding domains in the antibody construct of the invention (or two variable domains), those peptide linkers are preferred which comprise only a few number of amino acid residues, e.g. 12 amino acid residues or less. Thus, peptide linker of 12, 11, 10, 9, 8, 7, 6 or 5 amino acid residues are preferred. An envisaged peptide linker with less than 5 amino acids comprises 4, 3, 2 or one amino acid(s) wherein Gly-rich linkers are preferred. A particularly preferred “single” amino acid in context of said “peptide linker” is Gly. Accordingly, said peptide linker may consist of the single amino acid Gly. Another preferred embodiment of a peptide linker is characterized by the amino acid sequence Gly-Gly-Gly-Gly-Ser, i.e. Gly₄Ser, or polymers thereof, i.e. (Gly₄Ser)x, where x is an integer of 1 or greater. The characteristics of said peptide linker, which comprise the absence of the promotion of secondary structures are known in the art and are described e.g. in Dall'Acqua et al. (Biochem. (1998) 37, 9266-9273), Cheadle et al. (Mol Immunol (1992) 29, 21-30) and Raag and Whitlow (FASEB (1995) 9(1), 73-80). Peptide linkers which also do not promote any secondary structures are preferred. The linkage of said domains to each other can be provided by, e.g. genetic engineering, as described in the examples. Methods for preparing fused and operatively linked bispecific single chain constructs and expressing them in mammalian cells or bacteria are well-known in the art (e.g. WO 99/54440 or Sambrook et al., Molecular Cloning: A Laboratory Manual, Cold Spring Harbor Laboratory Press, Cold Spring Harbor, N.Y., 2001).

[0067] Bispecific single chain molecules are known in the art and are described in WO 99/54440, Mack, J. Immunol. (1997), 158, 3965-3970, Mack, PNAS, (1995), 92, 7021-7025, Kufer, Cancer Immunol. Immunother., (1997), 45, 193-197, Loffler, Blood, (2000), 95, 6, 2098-2103, Brühl, Immunol., (2001), 166, 2420-2426, Kipriyanov, J. Mol. Biol., (1999), 293, 41-56. Techniques described for the production of single chain antibodies (see, inter alia, U.S. Pat. No. 4,946,778, Kontermann and Dübel (2010), loc. cit. and Little (2009), loc. cit.) can be adapted to produce single chain antibody constructs specifically recognizing (an) elected target(s).

[0068] Bivalent (also called divalent) or bispecific single-chain variable fragments (bi-scFvs or di-scFvs having the format (scFv)₂) can be engineered by linking two scFv molecules. If these two scFv molecules have the same binding specificity, the resulting (scFv)₂ molecule will preferably be called bivalent (i.e. it has two valences for the same target epitope). If the two scFv molecules have different binding specificities, the resulting (scFv)₂ molecule will preferably be called bispecific. The linking can be done by producing a single peptide chain with two VH regions and two VL regions, yielding tandem scFvs (see e.g. Kufer P. et al., (2004) Trends in Biotechnology 22(5):238-244). Another possibility is the creation of scFv molecules with linker peptides that are too short for the two variable regions to fold together (e.g. about five amino acids), forcing the scFvs to dimerize. This type is known as diabodies (see e.g. Hollinger, Philipp et al., (July 1993) Proceedings of the National Academy of Sciences of the United States of America 90 (14): 6444-8.).

[0069] Single domain antibodies comprise merely one (monomeric) antibody variable domain which is able to bind selectively to a specific antigen, independently of other V regions or domains. The first single domain antibodies were engineered from heavy chain antibodies found in camelids, and these are called V_{H}H fragments. Cartilaginous fishes also have heavy chain antibodies (IgNAR) from which single domain antibodies called V_{NAR} fragments can be obtained. An alternative approach is to split the dimeric variable domains from common immunoglobulins e.g. from humans or rodents into monomers, hence obtaining VH or VL as a single domain Ab. Although most research into single domain antibodies is currently based on heavy chain variable domains, nanobodies derived from light chains have also been shown to bind specifically to target epitopes. Examples of single domain antibodies are called sdAb, nanobodies or single variable domain antibodies.

[0070] A (single domain mAb)₂ is hence a monoclonal antibody construct composed of (at least) two single domain monoclonal antibodies, which are individually selected from the group comprising VH, VL, V_{H}H and V_{NAR}. The linker is preferably in the form of a peptide linker. Similarly, an “scFv-single domain mAb” is a monoclonal antibody construct composed of at least one single domain antibody as described above and one scFv molecule as described above. Again, the linker is preferably in the form of a peptide linker.

[0071] It is also envisaged that the antibody construct of the invention has, in addition to its function to bind to the target antigen and CD3, a further function. In this format, the antibody construct is a trifunctional or multifunctional antibody construct by targeting target cells through binding to the target antigen, mediating cytotoxic T cell activity through CD3 binding and providing a further function such as a label (fluorescent etc.), a therapeutic agent such as a toxin or radionuclide, etc.

[0072] Covalent modifications of the antibody constructs are also included within the scope of this invention, and are generally, but not always, done post-translationally. For example, several types of covalent modifications of the antibody construct are introduced into the molecule by reacting specific amino acid residues of the antibody construct with an organic derivatizing agent that is capable of reacting with selected side chains or the N- or C-terminal residues.

[0073] Cysteinyl residues are most commonly reacted with α-haloacetates (and corresponding amines), such as chloroacetic acid or chloroacetamide, to give carboxymethyl or carboxyamidomethyl derivatives. Cysteinyl residues also are derivatized by reaction with bromotrifluoroacetone, α-bromo-β-(5-imidazoyl)propionic acid, chloroacetyl phosphate, N-alkylmaleimides, 3-nitro-2-pyridyl disulfide, methyl 2-pyridyl disulfide, p-chloromercuribenzoate, 2-chloromercuri-4-nitrophenol, or chloro-7-nitrobenzo-2-oxa-1,3-diazole.

[0074] Histidyl residues are derivatized by reaction with diethylpyrocarbonate at pH 5.5-7.0 because this agent is relatively specific for the histidyl side chain. Para-bromophenacyl bromide also is useful; the reaction is preferably performed in 0.1 M sodium cacodylate at pH 6.0. Lysinyl and amino terminal residues are reacted with succinic or other carboxylic acid anhydrides. Derivatization with these agents has the effect of reversing the charge of the lysinyl residues. Other suitable reagents for derivatizing alpha-amino-containing residues include imidoesters such as methyl picolinimidate; pyridoxal phosphate; pyridoxal; chloroborohydride; trinitrobenzenesulfonic acid; O-methylisourea; 2,4-pentanedione; and transaminase-catalyzed reaction with glyoxylate.

[0075] Arginyl residues are modified by reaction with one or several conventional reagents, among them phenylglyoxal, 2,3-butanedione, 1,2-cyclohexanedione, and ninhydrin. Derivatization of arginine residues requires that the reaction be performed in alkaline conditions because of the high pKa of the guanidine functional group. Furthermore, these reagents may react with the groups of lysine as well as the arginine epsilon-amino group.

[0076] The specific modification of tyrosyl residues may be made, with particular interest in introducing spectral labels into tyrosyl residues by reaction with aromatic diazonium compounds or tetranitromethane. Most commonly, N-acetylimidazole and tetranitromethane are used to form 0-acetyl tyrosyl species and 3-nitro derivatives, respectively. Tyrosyl residues are iodinated using ¹²⁵I or ¹³¹I to prepare labeled proteins for use in radioimmunoassay, the chloramine T method described above being suitable.

[0077] Carboxyl side groups (aspartyl or glutamyl) are selectively modified by reaction with carbodiimides (R′—N═C═N—R′), where R and R′ are optionally different alkyl groups, such as 1-cyclohexyl-3-(2-morpholinyl-4-ethyl) carbodiimide or 1-ethyl-3-(4-azonia-4,4-dimethylpentyl) carbodiimide. Furthermore, aspartyl and glutamyl residues are converted to asparaginyl and glutaminyl residues by reaction with ammonium ions.

[0078] Derivatization with bifunctional agents is useful for crosslinking the antibody constructs of the present invention to a water-insoluble support matrix or surface for use in a variety of methods. Commonly used crosslinking agents include, e.g., 1,1-bis(diazoacetyl)-2-phenylethane, glutaraldehyde, N-hydroxysuccinimide esters, for example, esters with 4-azidosalicylic acid, homobifunctional imidoesters, including disuccinimidyl esters such as 3,3′-dithiobis(succinimidylpropionate), and bifunctional maleimides such as bis-N-maleimido-1,8-octane. Derivatizing agents such as methyl-3-[(p-azidophenyl)dithio]propioimidate yield photoactivatable intermediates that are capable of forming crosslinks in the presence of light. Alternatively, reactive water-insoluble matrices such as cyanogen bromide-activated carbohydrates and the reactive substrates described in U.S. Pat. Nos. 3,969,287; 3,691,016; 4,195,128; 4,247,642; 4,229,537; and 4,330,440 are employed for protein immobilization.

[0079] Glutaminyl and asparaginyl residues are frequently deamidated to the corresponding glutamyl and aspartyl residues, respectively. Alternatively, these residues are deamidated under mildly acidic conditions. Either form of these residues falls within the scope of this invention.

[0080] Other modifications include hydroxylation of proline and lysine, phosphorylation of hydroxyl groups of seryl or threonyl residues, methylation of the α-amino groups of lysine, arginine, and histidine side chains (T. E. Creighton, Proteins: Structure and Molecular Properties, W. H. Freeman & Co., San Francisco, 1983, pp. 79-86), acetylation of the N-terminal amine, and amidation of any C-terminal carboxyl group.

[0081] Another type of covalent modification of the antibody constructs included within the scope of this invention comprises altering the glycosylation pattern of the protein. As is known in the art, glycosylation patterns can depend on both the sequence of the protein (e.g., the presence or absence of particular glycosylation amino acid residues, discussed below), or the host cell or organism in which the protein is produced. Particular expression systems are discussed below.

[0082] Glycosylation of polypeptides is typically either N-linked or O-linked. N-linked refers to the attachment of the carbohydrate moiety to the side chain of an asparagine residue. The tri-peptide sequences asparagine-X-serine and asparagine-X-threonine, where X is any amino acid except proline, are the recognition sequences for enzymatic attachment of the carbohydrate moiety to the asparagine side chain. Thus, the presence of either of these tri-peptide sequences in a polypeptide creates a potential glycosylation site. O-linked glycosylation refers to the attachment of one of the sugars N-acetylgalactosamine, galactose, or xylose, to a hydroxyamino acid, most commonly serine or threonine, although 5-hydroxyproline or 5-hydroxylysine may also be used.

[0083] Addition of glycosylation sites to the antibody construct is conveniently accomplished by altering the amino acid sequence such that it contains one or more of the above-described tri-peptide sequences (for N-linked glycosylation sites). The alteration may also be made by the addition of, or substitution by, one or more serine or threonine residues to the starting sequence (for O-linked glycosylation sites). For ease, the amino acid sequence of an antibody construct is preferably altered through changes at the DNA level, particularly by mutating the DNA encoding the polypeptide at preselected bases such that codons are generated that will translate into the desired amino acids.

[0084] Another means of increasing the number of carbohydrate moieties on the antibody construct is by chemical or enzymatic coupling of glycosides to the protein. These procedures are advantageous in that they do not require production of the protein in a host cell that has glycosylation capabilities for N- and O-linked glycosylation. Depending on the coupling mode used, the sugar(s) may be attached to (a) arginine and histidine, (b) free carboxyl groups, (c) free sulfhydryl groups such as those of cysteine, (d) free hydroxyl groups such as those of serine, threonine, or hydroxyproline, (e) aromatic residues such as those of phenylalanine, tyrosine, or tryptophan, or (f) the amide group of glutamine. These methods are described in WO 87/05330, and in Aplin and Wriston, 1981, CRC Crit. Rev. Biochem., pp. 259-306.

[0085] Removal of carbohydrate moieties present on the starting antibody construct may be accomplished chemically or enzymatically. Chemical deglycosylation requires exposure of the protein to the compound trifluoromethanesulfonic acid, or an equivalent compound. This treatment results in the cleavage of most or all sugars except the linking sugar (N-acetylglucosamine or N-acetylgalactosamine), while leaving the polypeptide intact. Chemical deglycosylation is described by Hakimuddin et al., 1987, Arch. Biochem. Biophys. 259:52 and by Edge et al., 1981, Anal. Biochem. 118:131. Enzymatic cleavage of carbohydrate moieties on polypeptides can be achieved by the use of a variety of endo- and exo-glycosidases as described by Thotakura et al., 1987, Meth. Enzymol. 138:350. Glycosylation at potential glycosylation sites may be prevented by the use of the compound tunicamycin as described by Duskin et al., 1982, J. Biol. Chem. 257:3105. Tunicamycin blocks the formation of protein-N-glycoside linkages.

[0086] Other modifications of the antibody construct are contemplated herein. For example, another type of covalent modification of the antibody construct comprises linking the antibody construct to various non-proteinaceous polymers, including, but not limited to, various polyols such as polyethylene glycol, polypropylene glycol, polyoxyalkylenes, or copolymers of polyethylene glycol and polypropylene glycol, in the manner set forth in U.S. Pat. Nos. 4,640,835; 4,496,689; 4,301,144; 4,670,417; 4,791,192 or 4,179,337. In addition, as is known in the art, amino acid substitutions may be made in various positions within the antibody construct, e.g. in order to facilitate the addition of polymers such as PEG.

[0087] In some embodiments, the covalent modification of the antibody constructs of the invention comprises the addition of one or more labels. The labelling group may be coupled to the antibody construct via spacer arms of various lengths to reduce potential steric hindrance. Various methods for labelling proteins are known in the art and can be used in performing the present invention. The term “label” or “labelling group” refers to any detectable label. In general, labels fall into a variety of classes, depending on the assay in which they are to be detected—the following examples include, but are not limited to:
[0088] a) isotopic labels, which may be radioactive or heavy isotopes, such as radioisotopes or radionuclides (e.g., ³H, ¹⁴C, ¹⁵N, ³⁵S, ⁸⁹Zr, ⁹⁰Y, ⁹⁹Tc, ¹¹¹In, ¹²⁵I, ¹³¹I)
[0089] b) magnetic labels (e.g., magnetic particles)
[0090] c) redox active moieties
[0091] d) optical dye (including, but not limited to, chromophores, phosphors and fluorophores) such as fluorescent groups (e.g., FITC, rhodamine, lanthanide phosphors), chemiluminescent groups, and fluorophores which can be either “small molecule” fluores or proteinaceous fluores
[0092] e) enzymatic groups (e.g. horseradish peroxidase, β-galactosidase, luciferase, alkaline phosphatase)
[0093] f) biotinylated groups
[0094] g) predetermined polypeptide epitopes recognized by a secondary reporter (e.g., leucine zipper pair sequences, binding sites for secondary antibodies, metal binding domains, epitope tags, etc.)

[0095] By “fluorescent label” is meant any molecule that may be detected via its inherent fluorescent properties. Suitable fluorescent labels include, but are not limited to, fluorescein, rhodamine, tetramethylrhodamine, eosin, erythrosin, coumarin, methyl-coumarins, pyrene, Malacite green, stilbene, Lucifer Yellow, Cascade BlueJ, Texas Red, IAEDANS, EDANS, BODIPY FL, LC Red 640, Cy 5, Cy 5.5, LC Red 705, Oregon green, the Alexa-Fluor dyes (Alexa Fluor 350, Alexa Fluor 430, Alexa Fluor 488, Alexa Fluor 546, Alexa Fluor 568, Alexa Fluor 594, Alexa Fluor 633, Alexa Fluor 660, Alexa Fluor 680), Cascade Blue, Cascade Yellow and R-phycoerythrin (PE) (Molecular Probes, Eugene, Oreg.), FITC, Rhodamine, and Texas Red (Pierce, Rockford, Ill.), Cy5, Cy5.5, Cy7 (Amersham Life Science, Pittsburgh, Pa.). Suitable optical dyes, including fluorophores, are described in Molecular Probes Handbook by Richard P. Haugland.

[0096] Suitable proteinaceous fluorescent labels also include, but are not limited to, green fluorescent protein, including a Renilla, Ptilosarcus, or Aequorea species of GFP (Chalfie et al., 1994, Science 263:802-805), EGFP (Clontech Laboratories, Inc., Genbank Accession Number U55762), blue fluorescent protein (BFP, Quantum Biotechnologies, Inc. 1801 de Maisonneuve Blvd. West, 8th Floor, Montreal, Quebec, Canada H3H 1J9; Stauber, 1998, Biotechniques 24:462-471; Heim et al., 1996, Curr. Biol. 6:178-182), enhanced yellow fluorescent protein (EYFP, Clontech Laboratories, Inc.), luciferase (Ichiki et al., 1993, J. Immunol. 150:5408-5417), β galactosidase (Nolan et al., 1988, Proc. Natl. Acad. Sci. U.S.A. 85:2603-2607) and Renilla (WO92/15673, WO95/07463, WO98/14605, WO98/26277, WO99/49019, U.S. Pat. Nos. 5,292,658, 5,418,155, 5,683,888, 5,741,668, 5,777,079, 5,804,387, 5,874,304, 5,876,995, 5,925,558).

[0097] Leucine zipper domains are peptides that promote oligomerization of the proteins in which they are found. Leucine zippers were originally identified in several DNA-binding proteins (Landschulz et al., 1988, Science 240:1759), and have since been found in a variety of different proteins. Among the known leucine zippers are naturally occurring peptides and derivatives thereof that dimerize or trimerize. Examples of leucine zipper domains suitable for producing soluble oligomeric proteins are described in PCT application WO 94/10308, and the leucine zipper derived from lung surfactant protein D (SPD) described in Hoppe et al., 1994, FEBS Letters 344:191. The use of a modified leucine zipper that allows for stable trimerization of a heterologous protein fused thereto is described in Fanslow et al., 1994, Semin. Immunol. 6:267-78. In one approach, recombinant fusion proteins comprising the target antigen antibody fragment or derivative fused to a leucine zipper peptide are expressed in suitable host cells, and the soluble oligomeric target antigen antibody fragments or derivatives that form are recovered from the culture supernatant.

[0098] The antibody construct of the invention may also comprise additional domains, which are e.g. helpful in the isolation of the molecule or relate to an adapted pharmacokinetic profile of the molecule. Domains helpful for the isolation of an antibody construct may be selected from peptide motives or secondarily introduced moieties, which can be captured in an isolation method, e.g. an isolation column. Non-limiting embodiments of such additional domains comprise peptide motives known as Myc-tag, HAT-tag, HA-tag, TAP-tag, GST-tag, chitin binding domain (CBD-tag), maltose binding protein (MBP-tag), Flag-tag, Strep-tag and variants thereof (e.g. StrepII-tag) and His-tag. All herein disclosed antibody constructs characterized by the identified CDRs are preferred to comprise a His-tag domain, which is generally known as a repeat of consecutive His residues in the amino acid sequence of a molecule, preferably of six His residues.

[0099] T cells or T lymphocytes are a type of lymphocyte (itself a type of white blood cell) that play a central role in cell-mediated immunity. There are several subsets of T cells, each with a distinct function. T cells can be distinguished from other lymphocytes, such as B cells and NK cells, by the presence of a T cell receptor (TCR) on the cell surface. The TCR is responsible for recognizing antigens bound to major histocompatibility complex (MHC) molecules and is composed of two different protein chains. In 95% of the T cells, the TCR consists of an alpha (α) and beta (β) chain. When the TCR engages with antigenic peptide and MHC (peptide/MHC complex), the T lymphocyte is activated through a series of biochemical events mediated by associated enzymes, co-receptors, specialized adaptor molecules, and activated or released transcription factors

[0100] The CD3 receptor complex is a protein complex and is composed of four chains. In mammals, the complex contains a CD3γ (gamma) chain, a CD3δ (delta) chain, and two CD3ε (epsilon) chains. These chains associate with the T cell receptor (TCR) and the so-called ζ (zeta) chain to form the T cell receptor CD3 complex and to generate an activation signal in T lymphocytes. The CD3γ (gamma), CD3δ (delta), and CD3ε (epsilon) chains are highly related cell-surface proteins of the immunoglobulin superfamily containing a single extracellular immunoglobulin domain. The intracellular tails of the CD3 molecules contain a single conserved motif known as an immunoreceptor tyrosine-based activation motif or ITAM for short, which is essential for the signaling capacity of the TCR. The CD3 epsilon molecule is a polypeptide which in humans is encoded by the CD3E gene which resides on chromosome 11. The sequence of a preferred human CD3 epsilon extracellular domain is shown in SEQ ID NO: 610, and the most preferred CD3 binding epitope corresponding to amino acid residues 1-27 of the human CD3 epsilon extracellular domain is represented in SEQ ID NO: 7.

[0101] The redirected lysis of target cells via the recruitment of T cells by a multispecific, at least bispecific, antibody construct involves cytolytic synapse formation and delivery of perforin and granzymes. The engaged T cells are capable of serial target cell lysis, and are not affected by immune escape mechanisms interfering with peptide antigen processing and presentation, or clonal T cell differentiation; see, for example, WO 2007/042261.

[0102] Cytotoxicity mediated by bispecific antibody constructs can be measured in various ways. Effector cells can be e.g. stimulated enriched (human) CD8 positive T cells or unstimulated (human) peripheral blood mononuclear cells (PBMC). If the target cells are of macaque origin or express or are transfected with macaque target cell antigen, the effector cells should also be of macaque origin such as a macaque T cell line, e.g. 4119LnPx. The target cells should express (at least the extracellular domain of) target cell antigen, e.g. human or macaque target cell antigen. Target cells can be a cell line (such as CHO) which is stably or transiently transfected with target cell antigen, e.g. human or macaque target cell antigen. Alternatively, the target cells can be a target cell antigen positive natural expresser cell line, such as a human cancer cell line. Usually EC50 values are expected to be lower with target cell lines expressing higher levels of target cell antigen on the cell surface. The effector to target cell (E:T) ratio is usually about 10:1, but can also vary. Cytotoxic activity of bispecific antibody constructs can be measured in a ⁵¹chromium release assay (incubation time of about 18 hours) or in a in a FACS-based cytotoxicity assay (incubation time of about 48 hours). Modifications of the assay incubation time (cytotoxic reaction) are also possible. Other methods of measuring cytotoxicity are well-known to the skilled person and comprise MTT or MTS assays, ATP-based assays including bioluminescent assays, the sulforhodamine B (SRB) assay, WST assay, clonogenic assay and the ECIS technology.

[0103] The cytotoxic activity mediated by bispecific antibody constructs of the present invention is preferably measured in a cell-based cytotoxicity assay. It is represented by the EC₅₀ value, which corresponds to the half maximal effective concentration (concentration of the antibody construct which induces a cytotoxic response halfway between the baseline and maximum). Preferably, the EC₅₀ value of the bispecific antibody constructs is ≦20.000 pg/ml, more preferably ≦5000 pg/ml, even more preferably ≦1000 pg/ml, even more preferably ≦500 pg/ml, even more preferably ≦350 pg/ml, even more preferably ≦250 pg/ml, even more preferably ≦100 pg/ml, even more preferably ≦50 pg/ml, even more preferably ≦10 pg/ml, and most preferably ≦5 pg/ml.

[0104] Any of the above given EC₅₀ values can be combined with any one of the indicated scenarios of a cell-based cytotoxicity assay, e.g. in line with the method described in the appended example. For example, when (human) CD8 positive T cells or a macaque T cell line are used as effector cells, the EC₅₀ value of the target cell antigen/CD3 bispecific antibody construct is preferably ≦1000 pg/ml, more preferably ≦500 pg/ml, even more preferably ≦250 pg/ml, even more preferably ≦100 pg/ml, even more preferably ≦50 pg/ml, even more preferably ≦10 pg/ml, and most preferably ≦5 pg/ml. If in this assay the target cells are (human or macaque) target cell antigen transfected cells such as CHO cells, the EC₅₀ value of the target cell antigen/CD3 bispecific antibody construct is preferably ≦150 pg/ml, more preferably ≦100 pg/ml, even more preferably ≦50 pg/ml, even more preferably ≦30 pg/ml, even more preferably ≦10 pg/ml, and most preferably ≦5 pg/ml. If the target cells are a target cell antigen positive natural expresser cell line, then the EC₅₀ value is preferably ≦350 pg/ml, more preferably ≦250 pg/ml, even more preferably ≦200 pg/ml, even more preferably ≦100 pg/ml, even more preferably ≦150 pg/ml, even more preferably ≦100 pg/ml, and most preferably ≦50 pg/ml, or lower. When (human) PBMCs are used as effector cells, the EC₅₀ value of the target cell antigen/CD3 bispecific antibody construct is preferably ≦1000 pg/ml, more preferably ≦750 pg/ml, more preferably ≦500 pg/ml, even more preferably ≦350 pg/ml, even more preferably ≦250 pg/ml, even more preferably ≦100 pg/ml, and most preferably ≦50 pg/ml, or lower.

[0105] Preferably, the bispecific antibody constructs of the present invention do not induce/mediate lysis or do not essentially induce/mediate lysis of target cell antigen negative cells such as CHO cells. The term “do not induce lysis”, “do not essentially induce lysis”, “do not mediate lysis” or “do not essentially mediate lysis” means that an antibody constructs of the present invention does not induce or mediate lysis of more than 30%, preferably not more than 20%, more preferably not more than 10%, particularly preferably not more than 9%, 8%, 7%, 6% or 5% of target cell antigen negative cells, whereby lysis of a target cell antigen positive cell line is set to be 100%. This usually applies for concentrations of the antibody construct of up to 500 nM. The skilled person knows how to measure cell lysis without further ado. Moreover, the present specification teaches specific instructions how to measure cell lysis.

[0106] The difference in cytotoxic activity between the monomeric and the dimeric isoform of individual bispecific antibody constructs is referred to as “potency gap”. This potency gap can e.g. be calculated as ratio between EC₅₀ values of the molecule's monomeric and dimeric form. Potency gaps of the bispecific antibody constructs of the present invention are preferably ≦5, more preferably ≦4, even more preferably ≦3, even more preferably ≦2 and most preferably ≦1.

[0107] The first and/or the second (or any further) binding domain(s) of the antibody construct of the invention is/are preferably cross-species specific for members of the mammalian order of primates. Cross-species specific CD3 binding domains are, for example, described in WO 2008/119567. According to one embodiment, the first and/or second binding domain, in addition to binding to a target cell antigen and human CD3, respectively, will also bind to the target cell antigen/CD3 of primates including (but not limited to) new world primates (such as Callithrix jacchus, Saguinus Oedipus or Saimiri sciureus), old world primates (such baboons and macaques), gibbons, and non-human homininae.

[0108] In one aspect of the invention, the first binding domain binds to human CDH19 (SEQ ID NO: 611) and further binds to macaque CDH19, such as CDH19 of Macaca fascicularis (SEQ ID NO: 612). The affinity of the first binding domain for macaque CDH19 is preferably ≦15 nM, more preferably ≦10 nM, even more preferably ≦5 nM, even more preferably ≦1 nM, even more preferably ≦0.5 nM, even more preferably ≦0.1 nM, and most preferably ≦0.05 nM or even ≦0.01 nM.

[0109] Preferably the affinity gap of the antibody constructs according to the invention for binding to their specific macaque versus human target antigen, e.g. macaque CDH19 versus human CDH19 [maCDH19:huCDH19], is between 0.1 and 10, more preferably between 0.2 and 5, even more preferably between 0.3 and 2.5, even more preferably between 0.4 and 2, and most preferably between 0.5 and 1.

[0110] In a further embodiment of the antibody construct of the invention, the antibody construct comprises an FcRn binding peptide at the N-terminus and an FcRn binding peptide at the C-terminus selected from the group consisting of:
[0111] (a) the FcRn binding peptide at the N-terminus comprises the amino acid sequence QRFVTGHFGGLYPANG (SEQ ID NO: 2) and the one at the C-terminus comprises the amino acid sequence QRFCTGHFGGLHPCNG (SEQ ID NO: 5);
[0112] (b) the FcRn binding peptide at the N-terminus comprises the amino acid sequence QRFVTGHFGGLYPANG (SEQ ID NO: 2) and the one at the C-terminus comprises the amino acid sequence QRFVTGHFGGLHPANG (SEQ ID NO: 3);
[0113] (c) the FcRn binding peptide at the N-terminus comprises the amino acid sequence QRFVTGHFGGLHPANG (SEQ ID NO: 3) and the one at the C-terminus comprises the amino acid sequence QRFCTGHFGGLHPCNG (SEQ ID NO: 5);
[0114] (d) the FcRn binding peptide at the N-terminus comprises the amino acid sequence QRFVTGHFGGLHPANG (SEQ ID NO: 3) and the one at the C-terminus comprises the amino acid sequence QRFVTGHFGGLHPANG (SEQ ID NO: 3);
[0115] (e) the FcRn binding peptide at the N-terminus comprises the amino acid sequence QRFCTGHFGGLHPCNG (SEQ ID NO: 5) and the one at the C-terminus comprises the amino acid sequence QRFVTGHFGGLYPANG (SEQ ID NO: 2); and
[0116] (f) the FcRn binding peptide at the N-terminus comprises the amino acid sequence QRFCTGHFGGLHPCNG (SEQ ID NO: 5) and the one at the C-terminus comprises the amino acid sequence QRFVTGHFGGLHPANG (SEQ ID NO: 3).

[0117] As apparent form the data presented in Example 1, it has been surprisingly found that cyclic peptides, i.e. peptides comprising a cys-loop, are on the one hand critical for the production e.g. in the cell culture (upstream production criteria) and the isolation of bispecific single chain constructs (downstream production criteria). On the other hand, the example shows that the position of such cyclic peptide within the protein chain is decisive to the production and isolation of bispecific single chain constructs. The bispecific single chain antibody constructs of the invention comprising the identified combinations of FcRn binding peptides at the N-terminus and at the C-terminus of the construct allow the provision of an antibody construct with preferred tissue distribution characteristics while retaining their industrially acceptable upstream and downstream production criteria.

[0118] In a further embodiment of the antibody construct of the invention the FcRn binding peptides are linked to the antibody construct via peptide linker. It is preferred that the peptide linker has an amino acid sequence of (GGGGS)ₙ (SEQ ID NO: 6)ₙ wherein “n” is an integer in the range of 1 to 5. Further preferred is an integer “n” in the range of 1 to 3, and most preferably “n” is 1 or 2.

[0119] In one embodiment of the invention the construct comprises a further domain binding to serum albumin.

[0120] A particularly preferred albumin binding domain is e.g. the peptide having the sequence RDWDFDVFGGGTPVGG (SEQ ID NO: 609). However, domain binding to albumin which are of linear structure and do not comprise structures such cys-loops are preferred since such additional cys-loop structure in an antibody construct of the invention is assumed to be connected production issues.

[0121] Also in one embodiment of the antibody construct of the invention the target cell surface antigen, is a tumor antigen. It is preferred that this tumor antigen is selected from the group of consisting CDH19 (cadherin 19), MSLN (mesothelin, also described as megagaryocyte-potentiating factor [MPF]), DLL3, FLT3 (FMS-related tyrosine kinase 3, also described as stem cell tyrosine kinase 1 [STK1]) or FLK2), CD33 (also known as sialic acid-binding immunoglobuline-like lectin 3 [SIGLEC3]), CD20 (also known as B-lymphocytes surface antigen B1 [B1] or MS4A1) and EGFRvIII.

[0122] In an embodiment of the antibody construct of the invention the second binding domain binds to an epitope of human and Callithrix jacchus, Saguinus oedipus or Saimiri sciureus CD3ε chain, wherein the epitope is part of an amino acid sequence comprised in the group consisting of SEQ ID NO: 7 (human), SEQ ID NO: 8 (Callithrix jacchus), SEQ ID NO: 9 (Saguinus oedipus), and SEQ ID NO: 10 (Saimiri sciureus) and comprises at least the amino acid sequence Gln-Asp-Gly-Asn-Glu (SEQ ID NO: 11). Callithrix jacchus and Saguinus oedipus are both new world primate belonging to the family of Callitrichidae, while Saimiri sciureus is a new world primate belonging to the family of Cebidae.

[0123] In one embodiment the second binding domain comprises a VL region having CDR-L1-L3 and a VH region having CDR-H1-H3 selected from the group consisting of:
[0124] (a) CDR-L1-L3 as depicted in SEQ ID NOs:12-14 and CDR-H1-H3 as depicted in SEQ ID NOs:15-17;
[0125] (b) CDR-L1-L3 as depicted in SEQ ID NOs:24-26 and CDR-H1-H3 as depicted in SEQ ID NOs:27-29;
[0126] (c) CDR-L1-L3 as depicted in SEQ ID NOs:36-38 and CDR-H1-H3 as depicted in SEQ ID NOs:39-41;
[0127] (d) CDR-L1-L3 as depicted in SEQ ID NOs:48-50 and CDR-H1-H3 as depicted in SEQ ID NOs:51-53;
[0128] (e) CDR-L1-L3 as depicted in SEQ ID NOs:60-62 and CDR-H1-H3 as depicted in SEQ ID NOs:63-65;
[0129] (f) CDR-L1-L3 as depicted in SEQ ID NOs:72-74 and CDR-H1-H3 as depicted in SEQ ID NOs:75-77;
[0130] (g) CDR-L1-L3 as depicted in SEQ ID NOs:84-86 and CDR-H1-H3 as depicted in SEQ ID NOs:87-89;
[0131] (h) CDR-L1-L3 as depicted in SEQ ID NOs:96-98 and CDR-H1-H3 as depicted in SEQ ID NOs:99-101;
[0132] (i) CDR-L1-L3 as depicted in SEQ ID NOs:108-110 and CDR-H1-H3 as depicted in SEQ ID NOs:111-113;
[0133] (j) CDR-L1-L3 as depicted in SEQ ID NOs:120-122 and CDR-H1-H3 as depicted in SEQ ID NOs:123-125;
[0134] (k) CDR-L1-L3 as depicted in SEQ ID NOs: 616-618 and CDR-H1-H3 as depicted in SEQ ID NOs: 613-615;
[0135] (l) CDR-L1-L3 as depicted in SEQ ID NOs: 626-628 and CDR-H1-H3 as depicted in SEQ ID NOs: 623-625;
[0136] (m) CDR-L1-L3 as depicted in SEQ ID NOs: 636-638 and CDR-H1-H3 as depicted in SEQ ID NOs: 633-635;
[0137] (n) CDR-L1-L3 as depicted in SEQ ID NOs: 646-648 and CDR-H1-H3 as depicted in SEQ ID NOs: 643-645;
[0138] (o) CDR-L1-L3 as depicted in SEQ ID NOs: 656-658 and CDR-H1-H3 as depicted in SEQ ID NOs: 653-655;
[0139] (p) CDR-L1-L3 as depicted in SEQ ID NOs: 666-668 and CDR-H1-H3 as depicted in SEQ ID NOs: 663-665;
[0140] (q) CDR-L1-L3 as depicted in SEQ ID NOs: 676-678 and CDR-H1-H3 as depicted in SEQ ID NOs: 673-675; and
[0141] (r) CDR-L1-L3 as depicted in SEQ ID NOs: 686-688 and CDR-H1-H3 as depicted in SEQ ID NOs: 683-685.

[0142] In one embodiment the second binding domain comprises pairs of VH and VL chains selected from the group consisting of:
[0143] (a) a VH-chain as depicted in SEQ ID NO: 18 and a VL-chain as depicted in SEQ ID NO: 20;
[0144] (b) a VH-chain as depicted in SEQ ID NO: 30 and a VL-chain as depicted in SEQ ID NO: 32;
[0145] (c) a VH-chain as depicted in SEQ ID NO: 42 and a VL-chain as depicted in SEQ ID NO: 44;
[0146] (d) a VH-chain as depicted in SEQ ID NO: 54 and a VL-chain as depicted in SEQ ID NO: 56;
[0147] (e) a VH-chain as depicted in SEQ ID NO: 66 and a VL-chain as depicted in SEQ ID NO: 68;
[0148] (f) a VH-chain as depicted in SEQ ID NO: 78 and a VL-chain as depicted in SEQ ID NO: 80;
[0149] (g) a VH-chain as depicted in SEQ ID NO: 90 and a VL-chain as depicted in SEQ ID NO: 92;
[0150] (h) a VH-chain as depicted in SEQ ID NO: 102 and a VL-chain as depicted in SEQ ID NO: 104;
[0151] (i) a VH-chain as depicted in SEQ ID NO: 114 and a VL-chain as depicted in SEQ ID NO: 116;
[0152] (j) a VH-chain as depicted in SEQ ID NO: 126 and a VL-chain as depicted in SEQ ID NO: 12; 8
[0153] (k) a VH-chain as depicted in SEQ ID NO: 619 and a VL-chain as depicted in SEQ ID NO: 620;
[0154] (l) a VH-chain as depicted in SEQ ID NO: 629 and a VL-chain as depicted in SEQ ID NO: 630;
[0155] (m) a VH-chain as depicted in SEQ ID NO: 639 and a VL-chain as depicted in SEQ ID NO: 640;
[0156] (n) a VH-chain as depicted in SEQ ID NO: 649 and a VL-chain as depicted in SEQ ID NO: 650;
[0157] (o) a VH-chain as depicted in SEQ ID NO: 659 and a VL-chain as depicted in SEQ ID NO: 660;
[0158] (p) a VH-chain as depicted in SEQ ID NO: 669 and a VL-chain as depicted in SEQ ID NO: 670;
[0159] (q) a VH-chain as depicted in SEQ ID NO: 679 and a VL-chain as depicted in SEQ ID NO: 680; and
[0160] (r) a VH-chain as depicted in SEQ ID NO: 689 and a VL-chain as depicted in SEQ ID NO: 690.

[0161] Also in one embodiment of the antibody construct of the invention the second binding domain comprises an amino acid sequence as depicted in SEQ ID NO: 22, SEQ ID NO: 34, SEQ ID NO: 46, SEQ ID NO: 58, SEQ ID NO: 70, SEQ ID NO: 82, SEQ ID NO: 94, SEQ ID NO: 106, SEQ ID NO: 118, SEQ ID NO: 130, SEQ ID NO: 621, SEQ ID NO: 631, SEQ ID NO: 641, SEQ ID NO: 651, SEQ ID NO: 661, SEQ ID NO: 671, SEQ ID NO: 681, or SEQ ID NO: 691.

[0162] In a preferred embodiment of the antibody construct of the invention the domains are arranged from the N-terminus to the C-terminus a follows:
[0163] (FcRn binding peptide comprising SEQ ID NO: 1)-(VH chain of the first binding domain)-(VL chain of the first binding domain)-(VH chain of the second binding domain)-(VL chain of the second binding domain)-(FcRn binding peptide comprising SEQ ID NO: 4)
   [0164] or
[0165] (FcRn binding peptide comprising SEQ ID NO: 4)-(VH chain of the first binding domain)-(VL chain of the first binding domain)-(VH chain of the second binding domain)-(VL chain of the second binding domain)-(FcRn binding peptide comprising SEQ ID NO: 1)

[0166] Amino acid sequence modifications of the antibody constructs described herein are also contemplated. For example, it may be desirable to improve the binding affinity and/or other biological properties of the antibody construct. Amino acid sequence variants of the antibody constructs are prepared by introducing appropriate nucleotide changes into the antibody constructs nucleic acid, or by peptide synthesis. All of the below described amino acid sequence modifications should result in an antibody construct which still retains the desired biological activity (binding to target cell antigen and to CD3) of the unmodified parental molecule.

[0167] The term “amino acid” or “amino acid residue” typically refers to an amino acid having its art recognized definition such as an amino acid selected from the group consisting of: alanine (Ala or A); arginine (Arg or R); asparagine (Asn or N); aspartic acid (Asp or D); cysteine (Cys or C); glutamine (Gln or Q); glutamic acid (Glu or E); glycine (Gly or G); histidine (His or H); isoleucine (He or I): leucine (Leu or L); lysine (Lys or K); methionine (Met or M); phenylalanine (Phe or F); pro line (Pro or P); serine (Ser or S); threonine (Thr or T); tryptophan (Trp or W); tyrosine (Tyr or Y); and valine (Val or V), although modified, synthetic, or rare amino acids may be used as desired. Generally, amino acids can be grouped as having a nonpolar side chain (e.g., Ala, Cys, He, Leu, Met, Phe, Pro, Val); a negatively charged side chain (e.g., Asp, Glu); a positively charged sidechain (e.g., Arg, His, Lys); or an uncharged polar side chain (e.g., Asn, Cys, Gln, Gly, His, Met, Phe, Ser, Thr, Trp, and Tyr).

[0168] Amino acid modifications include, for example, deletions from, and/or insertions into, and/or substitutions of, residues within the amino acid sequences of the antibody constructs. Any combination of deletion, insertion, and substitution is made to arrive at the final construct, provided that the final construct possesses the desired characteristics. The amino acid changes also may alter post-translational processes of the antibody constructs, such as changing the number or position of glycosylation sites.

[0169] For example, 1, 2, 3, 4, 5, or 6 amino acids may be inserted or deleted in each of the CDRs (of course, dependent on their length), while 1, 2, 3, 4, 5, 6, 7, 8, 9, 10, 11, 12, 13, 14, 15, 16, 17, 18, 19, 20, or 25 amino acids may be inserted or deleted in each of the FRs. Preferably, amino acid sequence insertions include amino- and/or carboxyl-terminal fusions ranging in length from 1, 2, 3, 4, 5, 6, 7, 8, 9 or 10 residues to polypeptides containing a hundred or more residues, as well as intra-sequence insertions of single or multiple amino acid residues. An insertional variant of the antibody construct of the invention includes the fusion to the N-terminus or to the C-terminus of the antibody construct to an enzyme or a fusion to a polypeptide which increases the serum half-life of the antibody construct.

[0170] The sites of greatest interest for substitutional mutagenesis include the CDRs of the heavy and/or light chain, in particular the hypervariable regions, but FR alterations in the heavy and/or light chain are also contemplated. The substitutions are preferably conservative substitutions as described herein. Preferably, 1, 2, 3, 4, 5, 6, 7, 8, 9, or 10 amino acids may be substituted in a CDR, while 1, 2, 3, 4, 5, 6, 7, 8, 9, 10, 11, 12, 13, 14, 15, 16, 17, 18, 19, 20, or 25 amino acids may be substituted in the framework regions (FRs), depending on the length of the CDR or FR. For example, if a CDR sequence encompasses 6 amino acids, it is envisaged that one, two or three of these amino acids are substituted. Similarly, if a CDR sequence encompasses 15 amino acids it is envisaged that one, two, three, four, five or six of these amino acids are substituted.

[0171] A useful method for identification of certain residues or regions of the antibody constructs that are preferred locations for mutagenesis is called “alanine scanning mutagenesis” as described by Cunningham and Wells in Science, 244: 1081-1085 (1989). Here, a residue or group of target residues within the antibody construct is/are identified (e.g. charged residues such as arg, asp, his, lys, and glu) and replaced by a neutral or negatively charged amino acid (most preferably alanine or polyalanine) to affect the interaction of the amino acids with the epitope.

[0172] Those amino acid locations demonstrating functional sensitivity to the substitutions then are refined by introducing further or other variants at, or for, the sites of substitution. Thus, while the site or region for introducing an amino acid sequence variation is predetermined, the nature of the mutation per se needs not to be predetermined. For example, to analyze or optimize the performance of a mutation at a given site, alanine scanning or random mutagenesis may be conducted at a target codon or region, and the expressed antibody construct variants are screened for the optimal combination of desired activity. Techniques for making substitution mutations at predetermined sites in the DNA having a known sequence are well known, for example, M13 primer mutagenesis and PCR mutagenesis. Screening of the mutants is done using assays of antigen binding activities, such as e.g. CDH19 binding.

[0173] Generally, if amino acids are substituted in one or more or all of the CDRs of the heavy and/or light chain, it is preferred that the then-obtained “substituted” sequence is at least 60%, more preferably 65%, even more preferably 70%, particularly preferably 75%, more particularly preferably 80% identical to the “original” CDR sequence. This means that it is dependent of the length of the CDR to which degree it is identical to the “substituted” sequence. For example, a CDR having 5 amino acids is preferably 80% identical to its substituted sequence in order to have at least one amino acid substituted. Accordingly, the CDRs of the antibody construct may have different degrees of identity to their substituted sequences, e.g., CDRL1 may have 80%, while CDRL3 may have 90%.

[0174] Preferred substitutions (or replacements) are conservative substitutions. However, any substitution (including non-conservative substitution or one or more from the “exemplary substitutions” listed in Table 1, below) is envisaged as long as the antibody construct retains its capability to bind to target cell antigen via the first binding domain and to CD3 epsilon via the second binding domain and/or its CDRs have an identity to the then substituted sequence (at least 60%, more preferably 65%, even more preferably 70%, particularly preferably 75%, more particularly preferably 80% identical to the “original” CDR sequence).

[0175] Conservative substitutions are shown in Table 1 under the heading of “preferred substitutions”. If such substitutions result in a change in biological activity, then more substantial changes, denominated “exemplary substitutions” in Table A, or as further described below in reference to amino acid classes, may be introduced and the products screened for a desired characteristic.

TABLE A
Amino acid substitutions

| Original | Exemplary Substitutions | Preferred Substitutions |
|---|---|---|
| Ala (A) | val, leu, ile | val |
| Arg (R) | lys, gln, asn | lys |
| Asn (N) | gln, his, asp, lys, arg | gln |
| Asp (D) | glu, asn | glu |
| Cys (C) | ser, ala | ser |
| Gln (Q) | asn, glu | asn |
| Glu (E) | asp, gin | asp |
| Gly (G) | Ala | ala |
| His (H) | asn, gln, lys, arg | arg |
| Ile (I) | leu, val, met, ala, phe | leu |
| Leu (L) | norleucine, ile, val, met, ala | ile |
| Lys (K) | arg, gln, asn | arg |
| Met (M) | leu, phe, ile | leu |
| Phe (F) | leu, val, ile, ala, tyr | tyr |
| Pro (P) | Ala | ala |
| Ser (S) | Thr | thr |
| Thr (T) | Ser | ser |
| Trp (W) | tyr, phe | tyr |
| Tyr (Y) | trp, phe, thr, ser | phe |
| Val (V) | ile, leu, met, phe, ala | leu |

[0176] Substantial modifications in the biological properties of the antibody construct of the present invention are accomplished by selecting substitutions that differ significantly in their effect on maintaining (a) the structure of the polypeptide backbone in the area of the substitution, for example, as a sheet or helical conformation, (b) the charge or hydrophobicity of the molecule at the target site, or (c) the bulk of the side chain. Naturally occurring residues are divided into groups based on common side-chain properties: (1) hydrophobic: norleucine, met, ala, val, leu, ile; (2) neutral hydrophilic: cys, ser, thr; (3) acidic: asp, glu; (4) basic: asn, gin, his, lys, arg; (5) residues that influence chain orientation: gly, pro; and (6) aromatic: trp, tyr, phe.

[0177] Non-conservative substitutions will entail exchanging a member of one of these classes for another class. Any cysteine residue not involved in maintaining the proper conformation of the antibody construct may be substituted, generally with serine, to improve the oxidative stability of the molecule and prevent aberrant crosslinking. Conversely, cysteine bond(s) may be added to the antibody to improve its stability (particularly where the antibody is an antibody fragment such as an Fv fragment).

[0178] For amino acid sequences, sequence identity and/or similarity is determined by using standard techniques known in the art, including, but not limited to, the local sequence identity algorithm of Smith and Waterman, 1981, Adv. Appl. Math. 2:482, the sequence identity alignment algorithm of Needleman and Wunsch, 1970, J. Mol. Biol. 48:443, the search for similarity method of Pearson and Lipman, 1988, Proc. Nat. Acad. Sci. U.S.A. 85:2444, computerized implementations of these algorithms (GAP, BESTFIT, FASTA, and TFASTA in the Wisconsin Genetics Software Package, Genetics Computer Group, 575 Science Drive, Madison, Wis.), the Best Fit sequence program described by Devereux et al., 1984, Nucl. Acid Res. 12:387-395, preferably using the default settings, or by inspection. Preferably, percent identity is calculated by FastDB based upon the following parameters: mismatch penalty of 1; gap penalty of 1; gap size penalty of 0.33; and joining penalty of 30, “Current Methods in Sequence Comparison and Analysis,” Macromolecule Sequencing and Synthesis, Selected Methods and Applications, pp 127-149 (1988), Alan R. Liss, Inc.

[0179] An example of a useful algorithm is PILEUP. PILEUP creates a multiple sequence alignment from a group of related sequences using progressive, pairwise alignments. It can also plot a tree showing the clustering relationships used to create the alignment. PILEUP uses a simplification of the progressive alignment method of Feng & Doolittle, 1987, J. Mol. Evol. 35:351-360; the method is similar to that described by Higgins and Sharp, 1989, CABIOS 5:151-153. Useful PILEUP parameters including a default gap weight of 3.00, a default gap length weight of 0.10, and weighted end gaps.

[0180] Another example of a useful algorithm is the BLAST algorithm, described in: Altschul et al., 1990, J. Mol. Biol. 215:403-410; Altschul et al., 1997, Nucleic Acids Res. 25:3389-3402; and Karin et al., 1993, Proc. Natl. Acad. Sci. U.S.A. 90:5873-5787. A particularly useful BLAST program is the WU-BLAST-2 program which was obtained from Altschul et al., 1996, Methods in Enzymology 266:460-480. WU-BLAST-2 uses several search parameters, most of which are set to the default values. The adjustable parameters are set with the following values: overlap span=1, overlap fraction=0.125, word threshold (T)=II. The HSP S and HSP S2 parameters are dynamic values and are established by the program itself depending upon the composition of the particular sequence and composition of the particular database against which the sequence of interest is being searched; however, the values may be adjusted to increase sensitivity.

[0181] An additional useful algorithm is gapped BLAST as reported by Altschul et al., 1993, Nucl. Acids Res. 25:3389-3402. Gapped BLAST uses BLOSUM-62 substitution scores; threshold T parameter set to 9; the two-hit method to trigger ungapped extensions, charges gap lengths of k a cost of 10+k; Xu set to 16, and Xg set to 40 for database search stage and to 67 for the output stage of the algorithms. Gapped alignments are triggered by a score corresponding to about 22 bits.

[0182] Generally, the amino acid homology, similarity, or identity between individual variant CDRs are at least 60% to the sequences depicted herein, and more typically with preferably increasing homologies or identities of at least 65% or 70%, more preferably at least 75% or 80%, even more preferably at least 85%, 90%, 91%, 92%, 93%, 94%, 95%, 96%, 97%, 98%, 99%, and almost 100%. In a similar manner, “percent (%) nucleic acid sequence identity” with respect to the nucleic acid sequence of the binding proteins identified herein is defined as the percentage of nucleotide residues in a candidate sequence that are identical with the nucleotide residues in the coding sequence of the antibody construct. A specific method utilizes the BLASTN module of WU-BLAST-2 set to the default parameters, with overlap span and overlap fraction set to 1 and 0.125, respectively.

[0183] Generally, the nucleic acid sequence homology, similarity, or identity between the nucleotide sequences encoding individual variant CDRs and the nucleotide sequences depicted herein are at least 60%, and more typically with preferably increasing homologies or identities of at least 65%, 70%, 75%, 80%, 81%, 82%, 83%, 84%, 85%, 86%, 87%, 88%, 89%, 90%, 91%, 92%, 93%, 94%, 95%, 96%, 97%, 98%, or 99%, and almost 100%. Thus, a “variant CDR” is one with the specified homology, similarity, or identity to the parent CDR of the invention, and shares biological function, including, but not limited to, at least 60%, 65%, 70%, 75%, 80%, 81%, 82%, 83%, 84%, 85%, 86%, 87%, 88%, 89%, 90%, 91%, 92%, 93%, 94%, 95%, 96%, 97%, 98%, or 99% of the specificity and/or activity of the parent CDR.

[0184] It is furthermore envisaged that the bispecific antibody constructs of the present invention exhibit therapeutic efficacy or anti-tumor activity. This can e.g. be assessed in a study as disclosed in the following example of an advanced stage human tumor xenograft model:

[0185] On day 1 of the study, 5×10⁶ cells of a human target cell antigen positive cancer cell line are subcutaneously injected in the right dorsal flank of female NOD/SCID mice. When the mean tumor volume reaches about 100 mm³, in vitro expanded human CD3 positive T cells are transplanted into the mice by injection of about 2×10⁷ cells into the peritoneal cavity of the animals. Mice of vehicle control group 1 do not receive effector cells and are used as an untransplanted control for comparison with vehicle control group 2 (receiving effector cells) to monitor the impact of T cells alone on tumor growth. The antibody treatment starts when the mean tumor volume reaches about 200 mm³. The mean tumor size of each treatment group on the day of treatment start should not be statistically different from any other group (analysis of variance). Mice are treated with 0.5 mg/kg/day of a target cell antigen/CD3 bispecifc antibody construct by intravenous bolus injection for about 15 to 20 days. Tumors are measured by caliper during the study and progress evaluated by intergroup comparison of tumor volumes (TV). The tumor growth inhibition T/C [%] is determined by calculating TV as T/C %=100×(median TV of analyzed group)/(median TV of control group 2).

[0186] The skilled person knows how to modify or adapt certain parameters of this study, such as the number of injected tumor cells, the site of injection, the number of transplanted human T cells, the amount of bispecific antibody constructs to be administered, and the timelines, while still arriving at a meaningful and reproducible result. Preferably, the tumor growth inhibition T/C [%] is ≦70 or ≦60, more preferably ≦50 or ≦40, even more preferably ≦30 or ≦20 and most preferably ≦10 or ≦5 or even ≦2.5.

[0187] In one embodiment, the bispecific antibody constructs of the present invention exhibit high monomer yields under standard research scale conditions, e.g., in a standard two-step purification process. Preferably the monomer yield of the antibody constructs according to the invention is ≧0.25 mg/L supernatant, more preferably ≧0.5 mg/L, even more preferably ≧1 mg/L, and most preferably ≧3 mg/L supernatant.

[0188] Likewise, the yield of the dimeric antibody construct isoforms and the monomer percentage (i.e., monomer:(monomer+dimer)) of the antibody constructs can be determined. The productivity of monomeric and dimeric antibody constructs and the calculated monomer percentage can e.g. be obtained in the SEC purification step of culture supernatant from standardized research-scale production in roller bottles. In one embodiment, the monomer percentage of the antibody constructs is ≧80%, more preferably ≧85%, even more preferably ≧90%, and most preferably ≧95%.

[0189] In a further embodiment, the percentage of identity to human germline of the antibody constructs according to the invention is ≧70% or ≧75%, more preferably ≧80% or ≧85%, even more preferably ≧90%, and most preferably ≧95%. Identity to human antibody germline gene products is thought to be an important feature to reduce the risk of therapeutic proteins to elicit an immune response against the drug in the patient during treatment. Hwang & Foote (“Immunogenicity of engineered antibodies”; Methods 36 (2005) 3-10) demonstrate that the reduction of non-human portions of drug antibody constructs leads to a decrease of risk to induce anti-drug antibodies in the patients during treatment. By comparing an exhaustive number of clinically evaluated antibody drugs and the respective immunogenicity data, the trend is shown that humanization of the V-regions of antibodies makes the protein less immunogenic (average 5.1% of patients) than antibodies carrying unaltered non-human V regions (average 23.59% of patients). A higher degree of identity to human sequences is hence desirable for V-region based protein therapeutics in the form of antibody constructs. For this purpose of determining the germline identity, the V-regions of VL can be aligned with the amino acid sequences of human germline V segments and J segments (http://vbase.mrc-cpe.cam.ac.uk/) using Vector NTI software and the amino acid sequence calculated by dividing the identical amino acid residues by the total number of amino acid residues of the VL in percent. The same can be for the VH segments (http://vbase.mrc-cpe.cam.ac.uk/) with the exception that the VH CDR3 may be excluded due to its high diversity and a lack of existing human germline VH CDR3 alignment partners. Recombinant techniques can then be used to increase sequence identity to human antibody germline genes.

[0190] In one embodiment, the antibody constructs have a preferred plasma stability (ratio of EC50 with plasma to EC50 w/o plasma) of ≦5, more preferably ≦4, even more preferably ≦3, and most preferably ≦2. The plasma stability of an antibody construct can be tested by incubation of the construct in human plasma at 37° C. for 24 hours followed by EC50 determination in a 51chromium release cytotoxicity assay. The effector cells in the cytotoxicity assay can be stimulated enriched human CD8 positive T cells. Target cells can e.g. be CHO cells transfected with human target cell antigen. The effector to target cell (E:T) ratio can be chosen as 10:1. The human plasma pool used for this purpose is derived from the blood of healthy donors collected by EDTA coated syringes. Cellular components are removed by centrifugation and the upper plasma phase is collected and subsequently pooled. As control, antibody constructs are diluted immediately prior to the cytotoxicity assay in RPMI-1640 medium. The plasma stability is calculated as ratio of EC50 (after plasma incubation) to EC50 (control).

[0191] It is preferred that the monomer to dimer conversion of antibody constructs of the invention is low. The conversion can be measured under different conditions and analyzed by high performance size exclusion chromatography. For example, incubation of the monomeric isoforms of the antibody constructs can be carried out for 7 days at 37° C. and concentrations of e.g. 100 μg/ml or 250 μg/ml in an incubator. Under these conditions, it is preferred that the antibody constructs of the invention show a dimer percentage that is ≦55%, more preferably ≦4%, even more preferably ≦3%, even more preferably ≦2.5%, even more preferably ≦2%, even more preferably ≦1.5%, and most preferably ≦1%.

[0192] It is also preferred that the bispecific antibody constructs of the present invention present with very low dimer conversion after a number of freeze/thaw cycles. For example, the antibody construct monomer is adjusted to a concentration of 250 μg/ml e.g. in SEC running buffer and subjected to three freeze/thaw cycles (freezing at −80° C. for 30 min followed by thawing for 30 min at room temperature), followed by high performance SEC to determine the percentage of initially monomeric antibody construct, which had been converted into dimeric antibody construct. Preferably the dimer percentages of the bispecific antibody constructs are ≦5%, more preferably ≦4%, even more preferably ≦3%, even more preferably ≦2.5%, even more preferably ≦2%, even more preferably ≦1.5%, and most preferably ≦1%, for example after three freeze/thaw cycles.

[0193] The bispecific antibody constructs of the present invention preferably show a favorable thermostability with melting temperatures above 60° C. This parameter can be determined as follows: Temperature melting curves are determined by Differential Scanning calorimetry (DSC) to determine intrinsic biophysical protein stabilities of the antibody constructs. These experiments are performed using a MicroCal LLC (Northampton, Mass., U.S.A) VP-DSC device. The energy uptake of a sample containing an antibody construct is recorded from 20° C. to 90° C. compared to a sample containing only the formulation buffer. The antibody constructs are adjusted to a final concentration of 250 μg/ml e.g. in SEC running buffer. For recording of the respective melting curve, the overall sample temperature is increased stepwise. At each temperature T energy uptake of the sample and the formulation buffer reference is recorded. The difference in energy uptake Cp (kcal/mole/° C.) of the sample minus the reference is plotted against the respective temperature. The melting temperature is defined as the temperature at the first maximum of energy uptake.

[0194] In a further embodiment the antibody construct according to the invention is stable at acidic pH. The more tolerant the antibody construct behaves at unphysiologic pH such as pH 5.5 (a pH which is required to run e.g. a cation exchange chromatography), the higher is the recovery of the antibody construct eluted from an ion exchange column relative to the total amount of loaded protein. Recovery of the antibody construct from an ion (e.g., cation) exchange column at pH 5.5 is preferably ∝30%, more preferably ≧40%, more preferably ≧50%, even more preferably ≧60%, even more preferably ≧70%, even more preferably ≧80%, and most preferably ≧90%.

[0195] In an alternative embodiment, the invention provides a polynucleotide encoding an antibody construct of the invention.

[0196] A polynucleotide is a biopolymer composed of 13 or more nucleotide monomers covalently bonded in a chain. DNA (such as cDNA) and RNA (such as mRNA) are examples of polynucleotides with distinct biological function. Nucleotides are organic molecules that serve as the monomers or subunits of nucleic acid molecules like DNA or RNA. The nucleic acid molecule or polynucleotide can be double stranded and single stranded, linear and circular. It is preferably comprised in a vector which is preferably comprised in a host cell. Said host cell is, e.g. after transformation or transfection with the vector or the polynucleotide of the invention, capable of expressing the antibody construct. For that purpose the polynucleotide or nucleic acid molecule is operatively linked with control sequences.

[0197] The genetic code is the set of rules by which information encoded within genetic material (nucleic acids) is translated into proteins. Biological decoding in living cells is accomplished by the ribosome which links amino acids in an order specified by mRNA, using tRNA molecules to carry amino acids and to read the mRNA three nucleotides at a time. The code defines how sequences of these nucleotide triplets, called codons, specify which amino acid will be added next during protein synthesis. With some exceptions, a three-nucleotide codon in a nucleic acid sequence specifies a single amino acid. Because the vast majority of genes are encoded with exactly the same code, this particular code is often referred to as the canonical or standard genetic code. While the genetic code determines the protein sequence for a given coding region, other genomic regions can influence when and where these proteins are produced.

[0198] Furthermore, the invention provides a vector comprising a polynucleotide/nucleic acid molecule of the invention.

[0199] A vector is a nucleic acid molecule used as a vehicle to transfer (foreign) genetic material into a cell. The term “vector” encompasses—but is not restricted to—plasmids, viruses, cosmids and artificial chromosomes. In general, engineered vectors comprise an origin of replication, a multicloning site and a selectable marker. The vector itself is generally a nucleotide sequence, commonly a DNA sequence, that comprises an insert (transgene) and a larger sequence that serves as the “backbone” of the vector. Modern vectors may encompass additional features besides the transgene insert and a backbone: promoter, genetic marker, antibiotic resistance, reporter gene, targeting sequence, protein purification tag. Vectors called expression vectors (expression constructs) specifically are for the expression of the transgene in the target cell, and generally have control sequences.

[0200] The term “control sequences” refers to DNA sequences necessary for the expression of an operably linked coding sequence in a particular host organism. The control sequences that are suitable for prokaryotes, for example, include a promoter, optionally an operator sequence, and a ribosome binding site. Eukaryotic cells are known to utilize promoters, polyadenylation signals, and enhancers.

[0201] A nucleic acid is “operably linked” when it is placed into a functional relationship with another nucleic acid sequence. For example, DNA for a presequence or secretory leader is operably linked to DNA for a polypeptide if it is expressed as a preprotein that participates in the secretion of the polypeptide; a promoter or enhancer is operably linked to a coding sequence if it affects the transcription of the sequence; or a ribosome binding site is operably linked to a coding sequence if it is positioned so as to facilitate translation. Generally, “operably linked” means that the DNA sequences being linked are contiguous, and, in the case of a secretory leader, contiguous and in reading phase. However, enhancers do not have to be contiguous. Linking is accomplished by ligation at convenient restriction sites. If such sites do not exist, the synthetic oligonucleotide adaptors or linkers are used in accordance with conventional practice.

[0202] “Transfection” is the process of deliberately introducing nucleic acid molecules or polynucleotides (including vectors) into target cells. The term is mostly used for non-viral methods in eukaryotic cells. Transduction is often used to describe virus-mediated transfer of nucleic acid molecules or polynucleotides. Transfection of animal cells typically involves opening transient pores or “holes” in the cell membrane, to allow the uptake of material. Transfection can be carried out using calcium phosphate, by electroporation, by cell squeezing or by mixing a cationic lipid with the material to produce liposomes, which fuse with the cell membrane and deposit their cargo inside.

[0203] The term “transformation” is used to describe non-viral transfer of nucleic acid molecules or polynucleotides (including vectors) into bacteria, and also into non-animal eukaryotic cells, including plant cells. Transformation is hence the genetic alteration of a bacterial or non-animal eukaryotic cell resulting from the direct uptake through the cell membrane(s) from its surroundings and subsequent incorporation of exogenous genetic material (nucleic acid molecules). Transformation can be effected by artificial means. For transformation to happen, cells or bacteria must be in a state of competence, which might occur as a time-limited response to environmental conditions such as starvation and cell density.

[0204] Moreover, the invention provides a host cell transformed or transfected with the polynucleotide/nucleic acid molecule or with the vector of the invention.

[0205] As used herein, the terms “host cell” or “recipient cell” are intended to include any individual cell or cell culture that can be or has/have been recipients of vectors, exogenous nucleic acid molecules, and polynucleotides encoding the antibody construct of the present invention; and/or recipients of the antibody construct itself. The introduction of the respective material into the cell is carried out by way of transformation, transfection and the like. The term “host cell” is also intended to include progeny or potential progeny of a single cell. Because certain modifications may occur in succeeding generations due to either natural, accidental, or deliberate mutation or due to environmental influences, such progeny may not, in fact, be completely identical (in morphology or in genomic or total DNA complement) to the parent cell, but is still included within the scope of the term as used herein. Suitable host cells include prokaryotic or eukaryotic cells, and also include but are not limited to bacteria, yeast cells, fungi cells, plant cells, and animal cells such as insect cells and mammalian cells, e.g., murine, rat, macaque or human.

[0206] The antibody construct of the invention can be produced in bacteria. After expression, the antibody construct of the invention is isolated from the E. coli cell paste in a soluble fraction and can be purified through, e.g., affinity chromatography and/or size exclusion. Final purification can be carried out similar to the process for purifying antibody expressed e.g., in CHO cells.

[0207] In addition to prokaryotes, eukaryotic microbes such as filamentous fungi or yeast are suitable cloning or expression hosts for the antibody construct of the invention. Saccharomyces cerevisiae, or common baker's yeast, is the most commonly used among lower eukaryotic host microorganisms. However, a number of other genera, species, and strains are commonly available and useful herein, such as Schizosaccharomyces pombe, Kluyveromyces hosts such as K. lactis, K. fragilis (ATCC 12424), K. bulgaricus (ATCC 16045), K. wickeramii (ATCC 24178), K. waltii (ATCC 56500), K. drosophilarum (ATCC 36906), K. thermotolerans, and K. marxianus; yarrowia (EP 402 226); Pichia pastoris (EP 183 070); Candida; Trichoderma reesia (EP 244 234); Neurospora crassa; Schwanniomyces such as Schwanniomyces occidentalis; and filamentous fungi such as Neurospora, Penicillium, Tolypocladium, and Aspergillus hosts such as A. nidulans and A. niger.

[0208] Suitable host cells for the expression of glycosylated antibody construct of the invention are derived from multicellular organisms. Examples of invertebrate cells include plant and insect cells. Numerous baculoviral strains and variants and corresponding permissive insect host cells from hosts such as Spodoptera frugiperda (caterpillar), Aedes aegypti (mosquito), Aedes albopictus (mosquito), Drosophila melanogaster (fruit fly), and Bombyx mori have been identified. A variety of viral strains for transfection are publicly available, e.g., the L-1 variant of Autographa californica NPV and the Bm-5 strain of Bombyx mori NPV, and such viruses may be used as the virus herein according to the present invention, particularly for transfection of Spodoptera frugiperda cells.

[0209] Plant cell cultures of cotton, corn, potato, soybean, petunia, tomato, Arabidopsis and tobacco can also be used as hosts. Cloning and expression vectors useful in the production of proteins in plant cell culture are known to those of skill in the art. See e.g. Hiatt et al., Nature (1989) 342: 76-78, Owen et al. (1992) Bio/Technology 10: 790-794, Artsaenko et al. (1995) The Plant J 8: 745-750, and Fecker et al. (1996) Plant Mol Biol 32: 979-986.

[0210] However, interest has been greatest in vertebrate cells, and propagation of vertebrate cells in culture (tissue culture) has become a routine procedure. Examples of useful mammalian host cell lines are monkey kidney CV1 line transformed by SV40 (COS-7, ATCC CRL 1651); human embryonic kidney line (293 or 293 cells subcloned for growth in suspension culture, Graham et al., J. Gen Virol. 36: 59 (1977)); baby hamster kidney cells (BHK, ATCC CCL 10); Chinese hamster ovary cells/-DHFR (CHO, Urlaub et al., Proc. Natl. Acad. Sci. USA 77: 4216 (1980)); mouse sertoli cells (TM4, Mather, Biol. Reprod. 23: 243-251 (1980)); monkey kidney cells (CVI ATCC CCL 70); African green monkey kidney cells (VERO-76, ATCC CRL1587); human cervical carcinoma cells (HELA, ATCC CCL 2); canine kidney cells (MDCK, ATCC CCL 34); buffalo rat liver cells (BRL 3A, ATCC CRL 1442); human lung cells (W138, ATCC CCL 75); human liver cells (Hep G2,1413 8065); mouse mammary tumor (MMT 060562, ATCC CCLS 1); TRI cells (Mather et al., Annals N. Y Acad. Sci. (1982) 383: 44-68); MRC 5 cells; FS4 cells; and a human hepatoma line (Hep G2).

[0211] The invention also provides a process for the production of an antibody construct of the invention, said process comprising culturing a host cell of the invention under conditions allowing the expression of the antibody construct of the invention and recovering the produced antibody construct from the culture.

[0212] As used herein, the term “culturing” refers to the in vitro maintenance, differentiation, growth, proliferation and/or propagation of cells under suitable conditions in a medium. The term “expression” includes any step involved in the production of an antibody construct of the invention including, but not limited to, transcription, post-transcriptional modification, translation, post-translational modification, and secretion.

[0213] When using recombinant techniques, the antibody construct can be produced intracellularly, in the periplasmic space, or directly secreted into the medium. If the antibody construct is produced intracellularly, as a first step, the particulate debris, either host cells or lysed fragments, are removed, for example, by centrifugation or ultrafiltration. Carter et al., Bio/Technology 10: 163-167 (1992) describe a procedure for isolating antibodies which are secreted to the periplasmic space of E. coli. Briefly, cell paste is thawed in the presence of sodium acetate (pH 3.5), EDTA, and phenylmethylsulfonylfluoride (PMSF) over about 30 min. Cell debris can be removed by centrifugation. Where the antibody is secreted into the medium, supernatants from such expression systems are generally first concentrated using a commercially available protein concentration filter, for example, an Amicon or Millipore Pellicon ultrafiltration unit. A protease inhibitor such as PMSF may be included in any of the foregoing steps to inhibit proteolysis and antibiotics may be included to prevent the growth of adventitious contaminants.

[0214] The antibody construct of the invention prepared from the host cells can be recovered or purified using, for example, hydroxylapatite chromatography, gel electrophoresis, dialysis, and affinity chromatography. Other techniques for protein purification such as fractionation on an ion-exchange column, ethanol precipitation, Reverse Phase HPLC, chromatography on silica, chromatography on heparin SEPHAROSE™, chromatography on an anion or cation exchange resin (such as a polyaspartic acid column), chromato-focusing, SDS-PAGE, and ammonium sulfate precipitation are also available depending on the antibody to be recovered. Where the antibody construct of the invention comprises a CH3 domain, the Bakerbond ABX resin (J. T. Baker, Phillipsburg, N.J.) is useful for purification.

[0215] Affinity chromatography is a preferred purification technique. The matrix to which the affinity ligand is attached is most often agarose, but other matrices are available. Mechanically stable matrices such as controlled pore glass or poly (styrenedivinyl) benzene allow for faster flow rates and shorter processing times than can be achieved with agarose.

[0216] Affinity chromatography is a preferred purification technique. The matrix to which the affinity ligand is attached is most often agarose, but other matrices are available. Mechanically stable matrices such as controlled pore glass or poly (styrenedivinyl) benzene allow for faster flow rates and shorter processing times than can be achieved with agarose.

[0217] In an alternative embodiment the invention provides a pharmaceutical composition comprising an antibody construct of the invention or an antibody construct produced according to the process of the invention.

[0218] One embodiment relates to an antibody construct of the invention or an antibody construct produced according to the process of the invention for use in the prevention, treatment or amelioration of a disease selected from a proliferative disease, a tumorous disease, a viral disease or an immunological disorder.

[0219] The formulations described herein are useful as pharmaceutical compositions in the treatment, amelioration and/or prevention of the pathological medical condition as described herein in a patient in need thereof. The term “treatment” refers to both therapeutic treatment and prophylactic or preventative measures. Treatment includes the application or administration of the formulation to the body, an isolated tissue, or cell from a patient who has a disease/disorder, a symptom of a disease/disorder, or a predisposition toward a disease/disorder, with the purpose to cure, heal, alleviate, relieve, alter, remedy, ameliorate, improve, or affect the disease, the symptom of the disease, or the predisposition toward the disease.

[0220] The term “amelioration” as used herein refers to any improvement of the disease state of a patient, by the administration of an antibody construct according to the invention to a subject in need thereof. Such an improvement may also be seen as a slowing or stopping of the progression patient's disease. The term “prevention” as used herein means the avoidance of the occurrence or re-occurrence of a patient having a disease as specified herein, by the administration of an antibody construct according to the invention to a subject in need thereof.

[0221] The term “disease” refers to any condition that would benefit from treatment with the antibody construct or the pharmaceutic composition described herein. This includes chronic and acute disorders or diseases including those pathological conditions that predispose the mammal to the disease in question.

[0222] Moreover, the invention provides a method for the treatment or amelioration of a proliferative disease, a tumorous disease, a viral disease or an immunological disorder, comprising the step of administering to a subject in need thereof the antibody construct of the invention or produced according to the process of the invention.

[0223] The terms “subject in need” or those “in need of treatment” includes those already with the disorder, as well as those in which the disorder is to be prevented. The subject in need or “patient” includes human and other mammalian subjects that receive either prophylactic or therapeutic treatment.

[0224] The antibody construct of the invention will generally be designed for specific routes and methods of administration, for specific dosages and frequencies of administration, for specific treatments of specific diseases, with ranges of bio-availability and persistence, among other things. The materials of the composition are preferably formulated in concentrations that are acceptable for the site of administration.

[0225] Formulations and compositions thus may be designed in accordance with the invention for delivery by any suitable route of administration. In the context of the present invention, the routes of administration include, but are not limited to
[0226] topical routes (such as epicutaneous, inhalational, nasal, opthalmic, auricular/aural, vaginal, mucosal);
[0227] enteral routes (such as oral, gastrointestinal, sublingual, sublabial, buccal, rectal); and
[0228] parenteral routes (such as intravenous, intraarterial, intraosseous, intramuscular, intracerebral, intracerebroventricular, epidural, intrathecal, subcutaneous, intraperitoneal, extra-amniotic, intraarticular, intracardiac, intradermal, intralesional, intrauterine, intravesical, intravitreal, transdermal, intranasal, transmucosal, intrasynovial, intraluminal).

[0229] The pharmaceutical compositions and the antibody construct of this invention are particularly useful for parenteral administration, e.g., subcutaneous or intravenous delivery, for example by injection such as bolus injection, or by infusion such as continuous infusion. Pharmaceutical compositions may be administered using a medical device. Examples of medical devices for administering pharmaceutical compositions are described in U.S. Pat. Nos. 4,475,196; 4,439,196; 4,447,224; 4,447, 233; 4,486,194; 4,487,603; 4,596,556; 4,790,824; 4,941,880; 5,064,413; 5,312,335; 5,312,335; 5,383,851; and 5,399,163.

[0230] In particular, the present invention provides for an uninterrupted administration of the suitable composition. As a non-limiting example, uninterrupted or substantially uninterrupted, i.e. continuous administration may be realized by a small pump system worn by the patient for metering the influx of therapeutic agent into the body of the patient. The pharmaceutical composition comprising the antibody construct of the invention can be administered by using said pump systems. Such pump systems are generally known in the art, and commonly rely on periodic exchange of cartridges containing the therapeutic agent to be infused. When exchanging the cartridge in such a pump system, a temporary interruption of the otherwise uninterrupted flow of therapeutic agent into the body of the patient may ensue. In such a case, the phase of administration prior to cartridge replacement and the phase of administration following cartridge replacement would still be considered within the meaning of the pharmaceutical means and methods of the invention together make up one “uninterrupted administration” of such therapeutic agent.

[0231] The continuous or uninterrupted administration of the antibody constructs of the invention may be intravenous or subcutaneous by way of a fluid delivery device or small pump system including a fluid driving mechanism for driving fluid out of a reservoir and an actuating mechanism for actuating the driving mechanism. Pump systems for subcutaneous administration may include a needle or a cannula for penetrating the skin of a patient and delivering the suitable composition into the patient's body. Said pump systems may be directly fixed or attached to the skin of the patient independently of a vein, artery or blood vessel, thereby allowing a direct contact between the pump system and the skin of the patient. The pump system can be attached to the skin of the patient for 24 hours up to several days. The pump system may be of small size with a reservoir for small volumes. As a non-limiting example, the volume of the reservoir for the suitable pharmaceutical composition to be administered can be between 0.1 and 50 ml.

[0232] The continuous administration may also be transdermal by way of a patch worn on the skin and replaced at intervals. One of skill in the art is aware of patch systems for drug delivery suitable for this purpose. It is of note that transdermal administration is especially amenable to uninterrupted administration, as exchange of a first exhausted patch can advantageously be accomplished simultaneously with the placement of a new, second patch, for example on the surface of the skin immediately adjacent to the first exhausted patch and immediately prior to removal of the first exhausted patch. Issues of flow interruption or power cell failure do not arise.

[0233] If the pharmaceutical composition has been lyophilized, the lyophilized material is first reconstituted in an appropriate liquid prior to administration. The lyophilized material may be reconstituted in, e.g., bacteriostatic water for injection (BWFI), physiological saline, phosphate buffered saline (PBS), or the same formulation the protein had been in prior to lyophilization.

[0234] The compositions of the present invention can be administered to the subject at a suitable dose which can be determined e.g. by dose escalating studies by administration of increasing doses of the antibody construct of the invention exhibiting cross-species specificity described herein to non-chimpanzee primates, for instance macaques. As set forth above, the antibody construct of the invention exhibiting cross-species specificity described herein can be advantageously used in identical form in preclinical testing in non-chimpanzee primates and as drug in humans. The dosage regimen will be determined by the attending physician and clinical factors. As is well known in the medical arts, dosages for any one patient depend upon many factors, including the patient's size, body surface area, age, the particular compound to be administered, sex, time and route of administration, general health, and other drugs being administered concurrently.

[0235] The term “effective dose” or “effective dosage” is defined as an amount sufficient to achieve or at least partially achieve the desired effect. The term “therapeutically effective dose” is defined as an amount sufficient to cure or at least partially arrest the disease and its complications in a patient already suffering from the disease. Amounts or doses effective for this use will depend on the condition to be treated (the indication), the delivered antibody construct, the therapeutic context and objectives, the severity of the disease, prior therapy, the patient's clinical history and response to the therapeutic agent, the route of administration, the size (body weight, body surface or organ size) and/or condition (the age and general health) of the patient, and the general state of the patient's own immune system. The proper dose can be adjusted according to the judgment of the attending physician such that it can be administered to the patient once or over a series of administrations, and in order to obtain the optimal therapeutic effect.

[0236] A typical dosage may range from about 0.1 μg/kg to up to about 30 mg/kg or more, depending on the factors mentioned above. In specific embodiments, the dosage may range from 1.0 μg/kg up to about 20 mg/kg, optionally from 10 μg/kg up to about 10 mg/kg or from 100 μg/kg up to about 5 mg/kg.

[0237] A therapeutic effective amount of an antibody construct of the invention preferably results in a decrease in severity of disease symptoms, an increase in frequency or duration of disease symptom-free periods or a prevention of impairment or disability due to the disease affliction. For treating target cell antigen-expressing tumors, a therapeutically effective amount of the antibody construct of the invention, e.g. an anti-target cell antigen/anti-CD3 antibody construct, preferably inhibits cell growth or tumor growth by at least about 20%, at least about 40%, at least about 50%, at least about 60%, at least about 70%, at least about 80%, or at least about 90% relative to untreated patients. The ability of a compound to inhibit tumor growth may be evaluated in an animal model predictive of efficacy in human tumors.

[0238] The pharmaceutical composition can be administered as a sole therapeutic or in combination with additional therapies such as anti-cancer therapies as needed, e.g. other proteinaceous and non-proteinaceous drugs. These drugs may be administered simultaneously with the composition comprising the antibody construct of the invention as defined herein or separately before or after administration of said antibody construct in timely defined intervals and doses.

[0239] The term “effective and non-toxic dose” as used herein refers to a tolerable dose of an inventive antibody construct which is high enough to cause depletion of pathologic cells, tumor elimination, tumor shrinkage or stabilization of disease without or essentially without major toxic effects. Such effective and non-toxic doses may be determined e.g. by dose escalation studies described in the art and should be below the dose inducing severe adverse side events (dose limiting toxicity, DLT).

[0240] The term “toxicity” as used herein refers to the toxic effects of a drug manifested in adverse events or severe adverse events. These side events might refer to a lack of tolerability of the drug in general and/or a lack of local tolerance after administration. Toxicity could also include teratogenic or carcinogenic effects caused by the drug.

[0241] The term “safety”, “in vivo safety” or “tolerability” as used herein defines the administration of a drug without inducing severe adverse events directly after administration (local tolerance) and during a longer period of application of the drug. “Safety”, “in vivo safety” or “tolerability” can be evaluated e.g. at regular intervals during the treatment and follow-up period. Measurements include clinical evaluation, e.g. organ manifestations, and screening of laboratory abnormalities. Clinical evaluation may be carried out and deviations to normal findings recorded/coded according to NCI-CTC and/or MedDRA standards. Organ manifestations may include criteria such as allergy/immunology, blood/bone marrow, cardiac arrhythmia, coagulation and the like, as set forth e.g. in the Common Terminology Criteria for adverse events v3.0 (CTCAE). Laboratory parameters which may be tested include for instance hematology, clinical chemistry, coagulation profile and urine analysis and examination of other body fluids such as serum, plasma, lymphoid or spinal fluid, liquor and the like. Safety can thus be assessed e.g. by physical examination, imaging techniques (i.e. ultrasound, x-ray, CT scans, Magnetic Resonance Imaging (MRI), other measures with technical devices (i.e. electrocardiogram), vital signs, by measuring laboratory parameters and recording adverse events. For example, adverse events in non-chimpanzee primates in the uses and methods according to the invention may be examined by histopathological and/or histochemical methods.

[0242] The above terms are also referred to e.g. in the Preclinical safety evaluation of biotechnology-derived pharmaceuticals S6; ICH Harmonised Tripartite Guideline; ICH Steering Committee meeting on Jul. 16, 1997.

[0243] Finally, the invention provides a kit comprising an antibody construct of the invention or produced according to the process of the invention, a vector of the invention and/or a host cell of the invention.

[0244] In the context of the present invention, the term “kit” means two or more components—one of which corresponding to the antibody construct, the pharmaceutical composition, the vector or the host cell of the invention—packaged together in a container, recipient or otherwise. A kit can hence be described as a set of products and/or utensils that are sufficient to achieve a certain goal, which can be marketed as a single unit.

[0245] The kit may comprise one or more recipients (such as vials, ampoules, containers, syringes, bottles, bags) of any appropriate shape, size and material (preferably waterproof, e.g. plastic or glass) containing the antibody construct or the pharmaceutical composition of the present invention in an appropriate dosage for administration (see above). The kit may additionally contain directions for use (e.g. in the form of a leaflet or instruction manual), means for administering the antibody construct of the present invention such as a syringe, pump, infuser or the like, means for reconstituting the antibody construct of the invention and/or means for diluting the antibody construct of the invention.

[0246] The invention also provides kits for a single-dose administration unit. The kit of the invention may also contain a first recipient comprising a dried/lyophilized antibody construct and a second recipient comprising an aqueous formulation. In certain embodiments of this invention, kits containing single-chambered and multi-chambered pre-filled syringes (e.g., liquid syringes and lyosyringes) are provided.

### BRIEF DESCRIPTION OF THE DRAWINGS

[0247] FIG. 1:

[0248] Eluation profiles for cation exchange column purification/isolation of BiTE antibody construct equipped with cyclic FcRnBP on both sites of the protein (panel A) compared to BiTE antibody construct with linear FcRnBP on the n-terminus and cyclic FcRnBP on the c-terminus.

[0249] FIG. 2:

[0250] FACS analysis of CDH19/CD3 bispecific antibodies on indicated cell lines: 1) CHO cells stably transfected with human CDH19, 2) human CD3 positive human T cell line HBP-ALL, 3) CHO cells stably transfected with cynomolgus CDH19, 4) macaque T cell line 4119 LnPx, 5) human melanoma cell line CHL-1 expressing native human CDH19, 6) untransfected CHO cells. Negative controls [1) to 6)]: detection antibodies without prior CDH19/CD3 bispecific antibody.

[0251] FIG. 3:

[0252] Cytotoxic activity of CDH19/CD3 bispecific antibodies as measured in a 48-hour FACS-based cytotoxicity assay. Effector cells: CD3-expressing macaque T cell line 4119LnPx. Target cells: cynomolgus CDH19-transfected CHO cells. Effector to target cell (E:T)-ratio: 10:1. The figure shows the results for CDH19 2G6 302xI2C HALB, CDH19 2G6 302xI2C 156, CDH19 2G6 302xI2C LFcBY, CDH19 2G6 302xI2C LFcBY 156, CDH19 2G6 302xI2C D3 HALB and for a negative control.

[0253] FIG. 4:

[0254] Neonatal Fc Receptor (FcRn) is Expressed by Human Pulmonary Microvascular Endothelial Cells (HPMEC).

[0255] Total cellular lysates of HPMEC and Jurkat E6.1 cells were separated by gel-electrophoresis. Anti-FcRn Western blotting showed a band at around 40 kDa in the HPMEC lysate (lane 1) which was less pronounced in the Jurkat E6.1 lysate (lane 2). As a control, anti-actin Western blotting showed a band at around 42 kDa in both HPMEC and Jurkat E6.1 total cellular lysates (lane 1 and 2) verifying equal amounts of protein were blotted.

[0256] FIG. 5:

[0257] Schematic Drawing of the In-Vitro Two-Chamber System.

[0258] Human pulmonary microvascular endothelial cells (HPMEC) were plated onto a transwell insert membrane and grown until confluence. Prior to the experiment, integrity of the endothelial cell monolayer was confirmed by transendothelial electric resistance (TEER) measurement. At t=0 h, analyte (BiTE antibody construct or Dextran) was given onto the endothelial cell monolayer inside of the transwell insert. The two-chamber system was then incubated for 4 h at 37° C. The amount of analyte that had passed through the endothelial cell monolayer into the lower chamber was quantified. After the experiment, the endothelial cell monolayer was stained and its integrity was checked microscopically.

[0259] FIG. 6:

[0260] Confluent Endothelial Cell Monolayers Exhibit Increased Transendothelial Electric Resistance (TEER) and Provide an Effective Barrier for Dextrans.

[0261] Transwell inserts were either filled with assay medium alone (blank) or HPMEC were plated in triplicates (n=3). A. After 24-30 h of cell growth, resistance (mean±SD) of blanks and HPMEC monolayers was 199±2Ω and 249±5Ω, respectively resulting in a HPMEC TEER value (mean±SD) of 16.67±2.08 Ω*cm². B. After 48 h of cell growth, FITC-Dextran 40 (2 mg/ml in assay medium containing 597 μM HSA) was given into the transwell inserts. After incubation for 4 h at 37° C., the mean fluorescence intensity (FI)±SD of FITC-Dextran 40 which had passed through the membrane alone (blank) or the HPMEC monolayer into the lower chamber was 4256±361 and 93±15, respectively. C. After the experiment, HPMEC monolayers were stained and checked microscopically (10× magnification) for confluence (lower lane). Data were analyzed by GraphPad Prism 6 software for statistical significance using an unpaired t-test (****: P≦0.0001).

[0262] FIG. 7:

[0263] Half-Life-Extended BiTE Antibody construct CDH19-LfcBY Is Efficiently Transcytosed Across HPMEC Monolayers at Physiologic HSA Concentrations.

[0264] HPMEC were plated onto transwell insert membranes in triplicates (n=3) for each tested condition. After 24-30 h of cell growth, HPMEC TEER values ranged between 12 and 17 Ω*cm² (data not shown). After 48 h of cell growth, 100 μl of the respective half-life-extended BiTE antibody construct (1 nM in assay medium containing 597 μM HSA) was given onto the endothelial cell monolayer inside of the transwell insert, while simultaneously filling 600 μl assay medium with HSA, but without BiTE antibody construct into the lower chamber. After incubation for 4 h at 37° C., the amount of BiTE antibody construct that had passed through the endothelial cell monolayer was quantified by electro-chemi-luminescence (ECL)-based ligand binding assay. Mean concentrations ±SD of recovered BiTE antibodies CDH19-156 (CDH19 2G6 302 x I2C-156-H6), CDH19-HALB (CDH19 2G6 302 x I2C-HALB-DY-H6), and CDH19-LfcBY (CDH19 2G6 302 x I2C-LfcBY-H6) were 0.424±0.051 pM, 0.248±0.026 pM, and 0.781±0.069 pM, respectively. After the experiment, HPMEC monolayers were stained and checked microscopically (10× magnification) for confluence (data not shown). Data were analyzed by Microsoft Excel 2010, and GraphPad Prism 6 software for statistical significance by using one-way ANOVA combined with Tukey post-test (****: P≦0.0001; ***: P≦0.001; *: P≦0.05).

[0265] FIG. 8:

[0266] Half-Life-Extended BiTE Antibody construct CDH19-LfcBY Is Efficiently Transcytosed Across HPMEC Monolayers in the Presence of 2% Human Serum.

[0267] HPMEC were plated onto transwell insert membranes in triplicates (n=3) for each tested condition. After 24-30 h of cell growth, HPMEC TEER values ranged between 19 and 31 Ω*cm² (data not shown). After 48 h of cell growth, 100 μl of the respective half-life-extended BiTE antibody construct (1 nM in assay medium containing 2% pooled human serum) was given onto the endothelial cell monolayer inside of the transwell insert, while simultaneously filling 600 μl assay medium with 2% pooled human serum, but without BiTE antibody construct into the lower chamber. After incubation for 4 h at 37° C., the amount of BITE antibody construct that had passed through the endothelial cell monolayer was quantified by electro-chemi-luminescence (ECL)-based ligand binding assay. Mean concentrations ±SD of recovered BiTE antibodies CDH19-156 (CDH19 2G6 302 x I2C-156-H6), CDH19-HALB (CDH19 2G6 302 x I2C-HALB-DY-H6), and CDH19-LfcBY (CDH19 2G6 302 x I2C-LfcBY-H6) were 0.849±0.130 pM, 0.658±0.047 pM, and 1.751±0.212 pM, respectively. After the experiment, HPMEC monolayers were stained and checked microscopically (10× magnification) for confluence (data not shown). Data were analyzed by Microsoft Excel 2010, and GraphPad Prism 6 software for statistical significance by using one-way ANOVA combined with Tukey post-test (***: P≦0.001; ns: P>0.05).

[0268] FIG. 9:

[0269] Half-Life-Extended BiTE Antibody construct CDH19-LfcBY Is Efficiently Transcytosed Across HPMEC Monolayers in the Presence of 20% Human Serum.

[0270] HPMEC were plated onto transwell insert membranes in triplicates (n=3) for each tested condition. After 24-30 h of cell growth, HPMEC TEER values ranged between 19 and 31 Ω*cm² (data not shown). After 48 h of cell growth, 100 μl of the respective half-life-extended BiTE antibody construct (1 nM in assay medium containing 20% pooled human serum) was given onto the endothelial cell monolayer inside of the transwell insert, while simultaneously filling 600 μl assay medium with 20% pooled human serum, but without BiTE antibody construct into the lower chamber. After incubation for 4 h at 37° C., the amount of BITE antibody construct that had passed through the endothelial cell monolayer was quantified by electro-chemi-luminescence (ECL)-based ligand binding assay. Mean concentrations ±SD of recovered BiTE antibodies CDH19-156 (CDH19 2G6 302 x I2C-156-H6), CDH19-HALB (CDH19 2G6 302 x I2C-HALB-DY-H6), and CDH19-LfcBY (CDH19 2G6 302 x I2C-LfcBY-H6) were 0.758±0.027 pM, 0.761±0.027 pM, and 1.976±0.355 pM, respectively. After the experiment, HPMEC monolayers were stained and checked microscopically (10× magnification) for confluence (data not shown). Data were analyzed by Microsoft Excel 2010, and GraphPad Prism 6 software for statistical significance by using one-way ANOVA combined with Tukey post-test (***: P≦0.001; ns: P>0.05).

[0271] FIG. 10:

[0272] Pharmacokinetics of BiTE antibody constructs

[0273] Four molecules named 1) 2G6-156; 2) 2G6-LFcBy; 3) 2G6-LFcBy-156; 4) 2G6-D3HSA were tested in the cynomolgus monkey in the context of a pharmacokinetic (PK) study. The figure shows the results in connection with Example 5.

[0274] FIG. 11:

[0275] Efficient Transcytosis of Half-Life-Extended BiTE-LfcBY is Target Independent
[0276] A) HPMECs were plated onto transwell insert membranes. After 24 h of cell growth, HPMEC TEER values ranged between 13 and 23 Ω·cm². After 48 h of cell growth, 100 μl of the respective half-life-extended BiTE antibody construct (1 nM in assay medium containing 20% pooled human serum) was plated onto the endothelial cell monolayer inside the transwell insert (n=4 up to n=10). 600 μl of assay medium with 20% pooled human serum without BiTE antibody construct was placed into the lower chamber. After incubation for 4 h at 37° C., the amount of BiTE antibody construct that had passed through the endothelial cell monolayer was quantified by electro-chemi-luminescence (ECL)-based ligand binding assay. BiTE antibody constructs containing -LfcBY tag were normalized to their respective BiTE-156 counterpart and bar diagrams represent fold change ±SD of recovered BiTE-LfcBY antibodies. CD33-LfcBY was transcytosed 2.9±0.7 fold more efficiently than CD33-156. CHD19-LfcBY was transcytosed 3.1±0.4 fold more efficiently than CDH19-156. A Cadherin-LfcBY BiTE construct was transcytosed 2.4±0.5 fold more efficiently than a Cadherin-156 BiTE. Data were analyzed by Microsoft Excel 2010, and GraphPad Prism 6 software for statistical significance by unpaired t-test (****: P≦0.0001). B) The bar diagram represents mean values of BiTE-LfcBY transcytosis over three independent targets normalized to their BiTE-156 counterpart. BiTE-LfcBY constructs were transcytosed 2.8±0.3 fold more efficiently than BiTE-156 constructs (***: P≦0.001).

[0277] FIG. 12:

[0278] Different Half-Life-Extended BiTE-LfcBY Permutations are Transcytosed Efficiently

[0279] HPMECs were plated onto transwell insert membranes. After 24 h of cell growth, HPMEC TEER values ranged between 13 and 23 Ω*cm². After 48 h of cell growth, 100 μl of the respective half-life-extended BiTE antibody construct (1 nM in assay medium containing 20% pooled human serum) was plated onto the endothelial cell monolayer inside the transwell insert (n=4 up to n=10). 600 μl of assay medium with 20% pooled human serum without BiTE antibody construct was placed into the lower chamber. After incubation for 4 h at 37° C., the amount of BiTE antibody construct that had passed through the endothelial cell monolayer was quantified by electro-chemi-luminescence (ECL)-based ligand binding assay. BiTE antibody constructs containing -LfcBY permutations were normalized to their respective BiTE-156 counterpart and bar diagrams represent fold change ±SD of recovered BiTE-LfcBY permutation antibodies. Compared to CH19-156, CH19-LH-FcB-CH was transcytosed 1.8±0.4, CH19-LH-FcB-LH 2.0±0.1, CH19-CH-FcB-LH 2.8±0.4, CH19-LY-FcB-LH 2.9±0.6, CH19-CH-FcB-LY 2.6±0.4 and CH19-LY-FcB-CH 3.1±0.4 fold more efficiently. Data were analyzed by Microsoft Excel 2010, and GraphPad Prism 6 software using ANOVA ONE-WAY and Dunnett's multiple comparisons test (****: P≦0.0001; ***: P≦0.001; **: P≦0.01).

[0280] FIG. 13:

[0281] Different Half-Life-Extended BiTE-LfcBY Permutations are Transcytosed Efficiently

[0282] HPMECs were plated onto transwell insert membranes. After 24 h of cell growth, HPMEC TEER values ranged between 13 and 23 Ω*cm². After 48 h of cell growth, 100 μl of the respective half-life-extended BiTE antibody BiTE antibody construct (1 nM in assay medium containing 20% pooled human serum) was plated onto the endothelial cell monolayer inside the transwell insert (n=4 up to n=10). 600 μl of assay medium with 20% pooled human serum without BiTE antibody BiTE antibody construct was placed into the lower chamber. After incubation for 4 h at 37° C., the amount of BiTE antibody BiTE antibody construct that had passed through the endothelial cell monolayer was quantified by electro-chemi-luminescence (ECL)-based ligand binding assay. BiTE antibody constructs containing -LfcBY permutations were normalized to their respective BiTE-156 counterpart and bar diagrams represent fold change ±SD of recovered BiTE-LfcBY permutation antibodies. Compared to Cad-156, Cad-LH-FcB-CH was transcytosed 3.1±0.4, Cad-LH-FcB-LH 3.2±1 Cad-CH-FcB-LH 2.9±0.4, Cad-LY-FcB-LH 1.8±0.1, Cad-CH-FcB-LY 2.4±0.2 and Cad-LY-FcB-CH 2.4±0.5 fold more efficiently. Data were analyzed by Microsoft Excel 2010, and GraphPad Prism 6 software using ANOVA ONE-WAY and Dunnett's multiple comparisons test (****: P≦0.0001; *: P≦0.05).

[0283] It should be understood that the inventions herein are not limited to particular methodology, protocols, or reagents, as such can vary. The discussion and examples provided herein are presented for the purpose of describing particular embodiments only and are not intended to limit the scope of the present invention, which is defined solely by the claims.

[0284] All publications and patents cited throughout the text of this specification (including all patents, patent applications, scientific publications, manufacturer's specifications, instructions, etc.), whether supra or infra, are hereby incorporated by reference in their entirety. Nothing herein is to be construed as an admission that the invention is not entitled to antedate such disclosure by virtue of prior invention. To the extent the material incorporated by reference contradicts or is inconsistent with this specification, the specification will supersede any such material.

### EXAMPLES

[0285] The following examples are provided for the purpose of illustrating specific embodiments or features of the present invention. These examples should not be construed as to limit the scope of this invention. The examples are included for purposes of illustration, and the present invention is limited only by the claims.

### Example 1

### 1 Production and Purification of Bispecific Single Chain Antibody Constructs

[0286] Standardized research scale production of CDH19 BiTE antibody constructs was performed in roller bottles. Harvested culture supernatant was subjected after filtration to a two step BiTE antibody construct purification based on immobilized metal affinity chromatography (IMAC) capture and subsequent size exclusion chromatography (SEC).

### 1.1 IMAC Capture Step of BiTE Antibody Constructs

[0287] Äkta® Explorer Systems (GE Healthcare) controlled by Unicorn® Software were used for chromatography. Immobilized metal affinity chromatography (IMAC) was performed using Fractogel EMD Chelate® (Merck, Darmstadt) which was loaded with ZnCl2 according to the protocol provided by the manufacturer. The column was equilibrated with buffer A (20 mM sodium phosphate buffer, 0.1 M NaCl, 10 mM imidazole, pH 7.2) and the cell culture supernatant (1000 ml) applied to the column (10 ml packing volume) at a flow rate of 4 ml/min. The column was washed with buffer A to remove unbound sample. Bound protein was eluted using a two step gradient of buffer B (20 mM sodium phosphate buffer, 0.1 M NaCl, 0.5 M imidazole, pH 7.2) according to the following procedure:

Step 1: 10% buffer B in 5 column volumes
Step 2: 100% buffer B in 5 column volumes

[0288] Eluted protein fractions from step 2 were pooled for further purification and concentrated to 3 ml final volume using Vivaspin (Sartorius-Stedim, Göttingen-Germany) centrifugation units with Polyethersulfon PES membran and a molecular weight cut-off of 10 kDa. All chemicals were of research grade and purchased from Merck (Darmstadt, Germany).

### 1.2 Size Exclusion Chromatography SEC

[0289] Size exclusion chromatography was performed on a HiLoad 16/60 Superdex 200 prep grade column (GE Healthcare) equilibrated with SEC buffer (20 mM NaCl, 30 mM NaH2PO4, 100 mM L-Arginin, pH 7.0) at a flow rate of 1 ml/min. BiTE antibody construct monomer and dimer fractions were pooled and a 24% trehalose stock solution was added to reach a final trehalose concentration of 4%.

[0290] Protein pools were measured at 280 nm in polycarbonate cuvettes with 1 cm lightpath (Eppendorf, Hamburg-Germany) and protein concentration was calculated on the base of the Vector NTI sequence analysis software calculated factor for each protein.

[0291] BiTE monomer pools were adjusted to 250 μg/ml with additional BiTE formulation buffer (20 mM NaCl, 30 mM NaH2PO4, 100 mM L-Arginin, 4% Trehalose, pH 7.0).

1.3 Comparison of FcRn BiTE Monomer Yield from Research Scale Production

[0292] As apparent form table 1 BiTE monomer yield for the BITE with cyclic FcRn Binding Peptide FcRnBP on both sides (n- and c-terminal, see SEQ ID NO:145) of the BiTE antibody construct showed a more then threefold less production rate compared to the BiTE equipped with the linear FcRnBP at the n-terminus and cyclic FcRnBP on the c-terminus of the BiTE protein (SEQ ID NO: 132).

TABLE 1
BiTE monomer yield

| | | C-terminal | BiTE Monomer |
|---|---|---|---|
| CDH19 BiTE | N-terminal FcRnBP | FcRnBP | Yield [μg/l SN] |
| CH19 2G6 302 × | Cyclic | Cyclic | 1963 |
| I2C × FcBY | | | |
| CH19 2G6 302 × | Linear | Cyclic | 6386 |
| I2C-LFcBY | | | |

Much less BiTE monomer yield of BiTE version equipped with cyclic FcRnBP on both sides compared to BiTE version with linear FcRnBP at the n-terminus and cyclic FcRnBP at the c-terminus

1.4 Recovery of FcRn BiTE Monomer from Cation Exchange Column

[0293] A 1 ml BioPro SP column manufactured by YMC (YMC Europe GmbH, Dinslaken-Germany) with sulphpropyl groups coupled to solid beads was connected to an Äkta Micro FPLC (GE Healthcare) device.

[0294] For column equilibration, sample dilution and washing a buffer consisting of 20 mM sodium dihydrogen phosphate and 30 mM sodium chloride adjusted with sodium hydroxide to pH of 5.5 was used.

[0295] For elution a buffer consisting of 20 mM NaH2PO4 and 1000 mM NaCl adjusted with sodium hydroxide to a pH of 5.5 was used.

[0296] 50 μg of BiTE antibody construct monomer were diluted with dilution buffer to 50 ml final volume.

[0297] After column equilibration 40 ml of the diluted protein solution was applied to the column followed by a wash step using column equilibration buffer.

[0298] Elution was carried out by a steadily increasing gradient with elution buffer from zero to 100% over a total volume corresponding to 200 column volumes. The whole run was monitored at 280 nm optical absorption.

[0299] In contrast to the BiTE antibody construct equipped with cyclic FcRnBP on both side of the BiTE protein the BiTE antibody construct equipped with a linear FcRnBP on the n-terminal side and cyclic FcRnBP on the c-terminal side of the BiTE showed elution from cation exchange column. This behavior indicates much preferable purification behavior and product yield in a scaled up production of a BiTE antibody construct FIG. 1

### Example 2

### Bispecific Binding and Interspecies Cross-Reactivity:

[0300] For confirmation of binding to human and cyno CDH19 and to human and macaque CD3, bispecific antibodies were tested by flow cytometry using indicated cell lines. CHO cells transfected with human CDH19, with cyno CDH19, the human melanoma cell line CHL-1 expressing native human CDH19, CD3-expressing human T cell leukemia cell line HPB-ALL (DSMZ, Braunschweig, ACC483) and the CD3-expressing macaque T cell line 4119LnPx (Knappe A, et al., Blood, 2000, 95, 3256-3261) were used as antigen positive cell lines. Moreover, untransfected CHO cells were used as negative control.

[0301] For flow cytometry 200,000 cells of the respective cell lines were incubated for 30 min on ice with 50 μl of purified bispecific antibody at a concentration of 5 μg/ml. The cells were washed twice in PBS/10% FCS and binding of the constructs was detected with a murine anti-His antibody (AbD Serotec; diluted 1:1000 in 50 μl PBS/10% FCS). After washing, bound anti-His antibodies were detected with an Fc gamma-specific antibody (Dianova) conjugated to phycoerythrin, diluted 1:100 in PBS/10% FCS. Samples were measured by flow cytometry on a FACSCanto II instrument and analyzed by FACSDiva software (both from Becton Dickinson).

[0302] The CDH19/CD3 bispecific antibodies stained CHO cells transfected with human CDH19, cyno CDH19, the human CDH19-expressing melanoma cell lines CHL-1 as well as human and macaque T cells. Moreover, there was no staining of untransfected CHO cells (see FIG. 2).

### Example 3

### Cytotoxic Activity

### Target Cell Labeling

[0303] For the analysis of cell lysis in flow cytometry assays, the fluorescent membrane dye DiOC₁₈ (DiO) (Molecular Probes, #V22886) was used to label cynomolgus CDH19 positive CHO cells—as target cells and distinguish them from effector cells. Briefly, cells were harvested, washed once with PBS and adjusted to 10⁶ cell/mL in PBS containing 2% (v/v) FBS and the membrane dye DiO (5 μL/10⁶ cells). After incubation for 3 min at 37° C., cells were washed twice in complete RPMI medium and the cell number adjusted to 1.25×10⁵ cells/mL. The vitality of cells was determined using 0.5% (v/v) isotonic EosinG solution (Roth, #45380).

### Flow Cytometry Based Analysis

[0304] This assay was designed to quantify the lysis of cynomolgus CDH19-transfected CHO cells in the presence of serial dilutions of CDH19 bispecific antibodies.

[0305] Equal volumes of DiO-labeled target cells and effector cells (i.e. CD3-expressing macaque T cell line 4119LnPx) were mixed, resulting in an E:T cell ratio of 10:1. 160 μL of this suspension were transferred to each well of a 96-well plate. 40 μL of serial dilutions of the CDH19 bispecific antibodies and a negative control bispecific (an CD3-based bispecific antibody recognizing an irrelevant target antigen) or RPMI complete medium as an additional negative control were added. The bispecific antibody-mediated cytotoxic reaction proceeded for 48 hours in a 7% CO₂ humidified incubator. Then cells were transferred to a new 96-well plate and loss of target cell membrane integrity was monitored by adding propidium iodide (PI) at a final concentration of 1 μg/mL. PI is a membrane impermeable dye that normally is excluded from viable cells, whereas dead cells take it up and become identifiable by fluorescent emission.

[0306] Samples were measured by flow cytometry on a FACSCanto II instrument and analyzed by FACSDiva software (both from Becton Dickinson).

[0307] Target cells were identified as DiO-positive cells. PI-negative target cells were classified as living target cells. Percentage of cytotoxicity was calculated according to the following formula:

$$Cytotoxicity [ \% ] = \frac{{n}_{dcad targ ct cclls}}{{n}_{target cells}} \times 100$$

$$n = number of events$$

[0308] Using GraphPad Prism 6 software (Graph Pad Software, San Diego), the percentage of cytotoxicity was plotted against the corresponding bispecific antibody concentrations. Dose response curves were analyzed with the four parametric logistic regression models for evaluation of sigmoid dose response curves with fixed hill slope and EC₅₀ values were calculated.

[0309] The cytotox results using the above described system for CDH19 2G6 302xI2C HALB, CDH19 2G6 302xI2C 156, CDH19 2G6 302xI2C LFcBY, CDH19 2G6 302xI2C LFcBY 156, CDH19 2G6 302xI2C D3 HALB and for a negative control are shown in FIG. 3

### Example 4

### In-Vitro Two-Chamber System to Mimic Transcytosis of Half-Life Extended BiTE Antibodies Through a Human Endothelial Cell Layer

### Cultivation and Harvesting of Endothelial Cells

[0310] Human pulmonary microvascular endothelial cells (HPMEC) (PromoCell, #C-12281) were used as endothelial cell model. Cryopreserved HPMEC at passage 2 (>5×10⁵ cells/vial) were cultivated in MV2 basal medium (PromoCell, #C-22221) supplemented with endothelial cell growth supplement (ECGS, 1:100) (ScienCell, #1052), 5-7.5% pooled human serum (AMGEN, internal lot: 140625DrM01), and 5-10 mg/ml human albumin (HSA) (Behring, #C66444411B) (further referred to as growth medium) in cell culture flasks (Sarstedt, #831.810.302) at 37° C. and 5% CO₂ in a Heraeus Cytoperm 2 (Thermo Scientific). Sub-cultivation of HPMEC was performed with the Detach Kit (PromoCell, #C-41200) consisting of HEPES-buffered balanced salt solution (PromoCell, #C-40000), trypsin-EDTA solution (0.04%/0.03%) (PromoCell, #C-41000), and trypsin neutralization solution (TNS) (PromoCell, #C-41100). Briefly, the medium was aspirated from the HPMEC layer and cells were washed with 3 ml of HEPES-buffered balanced salt solution. Addition of 3 ml of trypsin-EDTA solution diluted 1:1 with PBS for 1-3 min at room temperature led to detachment of HPMEC from the flask bottom. Inactivation of trypsin-EDTA solution was performed by addition of 3 ml TNS to the cell suspension. Cells were centrifuged at 300 g for 3 min in a Heraeus Megafuge 40 (Thermo Scientific) and seeded at a cell density of ˜10,000 cells/cm² into cell culture flasks (Sarstedt, #831.810.302, #833.911.302).

### Detection of Neonatal Fc Receptor (FcRn) in HPMEC by Western Blot

[0311] HPMEC (PromoCell, #C-12282, lot: 1071302.1, P7) were detached with EDTA (Biochrom, #L2113) and washed with PBS (Biochrom, #L1820). Jurkat cells E6.1 (ECCC, #88042803) were harvested and washed with PBS. 3×10⁶ cells each were lysed in 100 μl lysis buffer (20 mM Trizma base (Sigma Aldrich, #T1503) pH=8, 137 mM NaCl (Sigma-Aldrich, #S6546-1L), 10% Glycerol (Sigma-Aldrich, #G5516), 2 mM EDTA (Sigma-Aldrich, #03620), 1% Triton X100 (Sigma-Aldrich, #X100), 1× Protease Inhibitor Cocktail (Sigma-Aldrich, #13911-1BO), 100 mM NaF (Sigma-Aldrich, #919), 500 μM Na₃VO₄ (Sigma-Aldrich, #S6508)) for 15 min on ice. Non-soluble parts of the total cellular lysates were pelleted by centrifugation at 13,200 g for 15 min at 4° C. (Sigma Laborzentrifugen, #1K15) and supernatants were transferred into fresh 1.5 ml Eppendorf reaction tubes. 7.5 μl of lysates were diluted with 2 μl NuPAGE LDS sample buffer (life technologies, #NP0007) and denatured for 10 min at 70° C. 9.5 μl of the lysates and 10 μl of pre-stained protein standard (life technologies, #LC5800) were loaded onto a 4-12% BisTris Gel (life technologies, #NP0336BOX) and protein separation was performed in 1× NuPAGE MES running buffer (life technologies, #NP0002-02) by applying 200 V for 35 min. Proteins were transferred onto Nitrocellulose membrane (PALL BioTrace NT, #66485) according to XCell II Blot Module instructions (life technologies). Membrane was blocked using blocking solution (Thermo Scientific, #37542) for 1 h at room temperature under agitation. Membrane was incubated overnight at 4° C. in anti-FcRn antibody solution (Novus Biologicals, #NBP1-89128, diluted 1:100 in blocking buffer, supplemented with 0.05% Tween-20 (Sigma-Aldrich, #P1379)) under agitation. Membrane was washed 3 times for 5 min at room temperature with PBS-Tween (Biochrom, #L1820 with 0.05% Tween-20 (Sigma-Aldrich, #P1379)). Membrane was incubated for 1 h at room temperature in HRP-labelled secondary antibody solution (anti-rabbit IgG HRP antibody (Thermo Scientific, #31460), diluted 1:5000 in PBS-Tween and 3-5% milk (Fluka, #70166)) under agitation. Membrane was washed 2 times for 5 min at room temperature with PBS-Tween and 1 time for 5 min with PBS. Membrane was incubated in SuperSignalWest Pico Substrate (Thermo Scientific, #1856135) according to the manufacturer's instructions. Light sensitive film (CL-XPosure™ Film, Thermo Scientific, #34088) was exposed to the membrane and developed in the developer (VELPEX, EXTRA-X). Subsequently, membrane was incubated overnight at 4° C. in anti-beta actin antibody (Thermo Scientific, #MA1-91399, diluted 1:1000 in blocking buffer, supplemented with 0.05% Tween-20 (Sigma-Aldrich, #P1379)). Membrane was washed 3 times for 5 min at room temperature with PBS-Tween. Membrane was incubated for 1 h at room temperature in HRP-labelled secondary anti-mouse IgG antibody (Jackson ImmunoResearch, #415-035-100, diluted 1:5000 in PBS-Tween and 3-5% milk) under agitation. Membrane was developed as described in detail above.

### In-Vitro Two-Chamber System

### Plating of HPMEC

[0312] Polyester (PET) Membrane Transwell-Clear Inserts (Corning, #3470) with a pore size of 0.4 μm and an effective growth surface area of 0.33 cm² were coated with 10 μg/cm² Fibronectin (Sigma, #F2006) in PBS for 6 h at room temperature. The remaining Fibronectin solution was aspirated and inserts were washed once with PBS. 600 μl of growth medium were added to the outer chamber of the 24-well transwell system (Corning, #3470) and plates were equilibrated at 37° C. for 30 min. HPMEC were harvested using the Detach Kit (PromoCell, #C-41200) as described above. Cells were plated in 200 μl pre-warmed growth medium at a density of 8×10⁴/cm² onto equilibrated Fibronectin-coated transwell inserts. 4 wells were filled with growth medium only and used as blank values. After 24 h, 100 μl growth medium was added to both the inner well and outer chamber of the transwell system. Cell layer confluence was determined by transendothelial electric resistance (TEER) measurement.

### Transendothelial Electric Resistance (TEER) Measurement of an Endothelial Cell Monolayer

[0313] Electric resistance of each endothelial cell monolayer was measured using the Millicell ERS-2 system (Millipore, #MERS00002) with an STX03 adjustable electrode (Millipore, #MERSSTX03) according to the manufacturer's instructions. In brief, the functionality of the Millicell ERS-2 was tested by connecting the STX04 test electrode to the input port and switching on the power; the MODE switch was set to Ohm and, if necessary, the display was adjusted to 1000Ω with a screwdriver at the “R Adj” screw. The STX03 adjustable electrode was sterilized by immersing the electrode in 80% ethanol for 5 min. For electric resistance measurement the STX03 electrode was connected to the ERS-2 via the input port, the MODE switch was set to Ohm and the power switch was turned on. The electrode tips were immersed into the transwell insert in a 90 degree angle; the shorter tip inside the transwell insert, not touching the endothelial cell monolayer; the longer tip outside the transwell insert, and just touching the bottom of the outer well (Corning, #3470). Blank transwell inserts without cells but containing the same medium were measured to determine background resistance. Before electric resistance measurement, plates were allowed to cool down to room temperature; when all wells were measured once, measurement was started again from beginning and values were averaged ((Ωₘₑₐₛᵤᵣₑₘₑₙₜ₁+Ωₘₑₐₛᵤᵣₑₘₑₙₜ₂)/2=Ωₛₐₘₚₗₑ). The actual resistance of an individual cell monolayer was subsequently calculated by subtracting the mean resistance of the blank transwell inserts (Resistance Ω=Ωₛₐₘₚₗₑ−Ω_{blank}). For the determination of the Unit Area Resistance (TEER), the effective membrane area (0.33 cm²) of the 24-well transwell system (Corning, #3470) was taken into account (TEER=Resistance Ω*Effective Membrane Area). HPMEC cell monolayers characterized by a TEER value greater than 10 Ω*cm² were considered confluent.

### FITC-Dextran Permeability of an Endothelial Cell Monolayer

[0314] After 48 h of cell growth, transwell inserts containing a confluent HPMEC monolayer were transferred into a 24-well wash plate (FALCON, #353047), with each well pre-loaded with 700 μl pre-warmed MV basal medium (PromoCell, #C-22220) in order to wash the outside of the transwell inserts. 600 μl of assay medium (MV2 phenol red-free medium (PromoCell, #C-22226), ECGS (1:100) (ScienCell, #1052) and 597 μM HSA (Behring, #C66444411B)) were filled into blocked (700 μl/well of a 1:1 dilution of Starting Block (TBS) buffer (Thermo Scientific, #37542) in PBS/10% FBS overnight at 37° C.) receiver plates (24-well plates with ultra-low attachment surface (Corning, #3473)). Transwell inserts containing a confluent HPMEC monolayer were transferred from the wash plate into a pre-warmed receiver plate. At the same time, growth medium was removed from the inner well and the cell monolayer was washed once with 100 μl FITC-Dextran 40 (2 mg/ml in assay medium) (Sigma, #FD40). Then, 100 μl FITC-Dextran 40 (2 mg/ml in assay medium) were placed onto the HPMEC monolayer and the two-chamber assay was incubated for 4 h at 37° C. and 5% CO₂. FITC-Dextran 40 fluorescence recovered from the outer well of the two-chamber system was quantified by measuring at excitation wavelength 485 nm and emission wavelength 535 nm using a SPECTRAFluor Plus (Serial number: 94493; Firmware: V 6.00 06_07_2003 Spectra; XFLUOR4 Version: V 4.40). For the two-chamber assay, all plates were handled on a heating plate (minitube, #12055/0010) at 37° C.

### Staining of an Endothelial Cell Monolayer

[0315] After the two-chamber assay, cell monolayers were washed once with assay medium without FITC-Dextran 40. Then, 100 μl assay medium were placed onto the cell monolayers and 100 μl Paraformaldehyde (PFA) (4% in PBS) were added. The cell monolayers were fixed for 1 h at 37° C. or overnight at room temperature at a final PFA concentration of 2%. PFA solution was removed and the cell monolayers were stained with 100 μl cell stain solution (Crystal Violet solution (Sigma-Aldrich, #HT90132-1L), 1:20 in 4% PFA in PBS) for 10 min at room temperature. Subsequently, cell monolayers were washed twice with 200 μl ddH₂O. Pictures of the HPMEC monolayers were taken using a Nikon Eclipse E800 microscope equipped with a 10× objective.

### Transcytosis of Half-Life-Extended BiTE Antibodies Through an Endothelial Cell Monolayer

[0316] The two-chamber assay was performed with various half-life-extended BiTE antibodies as described in detail above for the FITC-Dextran 40 permeability. Assay medium consisted of MV2 phenol red-free medium (PromoCell, #C-22226), ECGS (1:100) (ScienCell, #1052), and HSA (Behring, #C66444411B) or pooled human serum (inactivated for 30 min at 56° C., AMGEN) as indicated. Dilutions of BiTE antibodies in above described assay medium were performed in Protein Low Binding Tubes (Sarstedt, #72.706.600). Identical assay medium was used for BiTE dilutions (i.e., in the upper transwell insert) and in the lower chamber of the two-chamber system. Plates were handled on a heating plate (minitube, #12055/0010) at 37° C. Different half-life-extended BiTE antibodies were assayed in 45 min time shifts to minimize time-dependent nonspecific adherence to plate surfaces. BiTE antibodies recovered from the lower well of the two-chamber system were quantified as described in detail below.

### Quantification of Half-Life-Extended BiTE Antibodies

[0317] Quantification of BiTE antibodies from transcytosis experiments was done using a highly sensitive electro-chemi-luminescence (ECL)-based ligand binding assay.

[0318] Calibrator samples to build the standard reference curve were prepared by spiking known concentrations of the different BiTE antibodies into the respective test matrix (assay medium) followed by 10 dilution steps (1:2 dilutions, resulting in a total of 11 calibrator samples spanning a concentration range of 0.0048 to 5.0 ng/ml). Formulation of calibrator samples was matched to the respective formulation of unknown samples. For each BiTE antibody construct, the same material (construct and batch) was used both for preparing calibrator samples and for transcytosis assays. The respective test matrix of unknown samples was adjusted to equal amounts of HSA (597 μM (Behring, #C66444411B)/Tween-80 (0.05% (J. T. Baker, #4117-04) or pooled human serum (20%, inactivated for 30 min at 56° C., AMGEN) before quantification.

[0319] In a first step, capture antibody 3E5A5 (specific for the anti-CD3 binding part of BiTE antibodies, AMGEN) was immobilized on a carbon microtiter plate equipped with two electrodes (standard plate, MSD, #L15XA). To this end, plates were coated with 25 μl/well of a 1 μg/ml antibody solution overnight at 5±3° C. and then blocked with 150 μl/well of a 5% BSA solution for at least 1 h.

[0320] Samples were prepared as described above. 25 μl of each calibrator or unknown sample were added to individual wells and incubated for 1 h at 25±2° C. on a shaker. Plates were then washed 3 times with PBS-Tween (0.05% Tween-80) using an automated plate washer. BiTE antibody construct bound to the capture antibody was detected via biotinylated anti-Penta-His antibody (Qiagen, #34440; 1 μg/ml, 25 μl/well, 30 min at 25±2° C. on a shaker) followed by Streptavidin-SulfoTag (MSD, #R32AD-1; 1 μg/ml, 25 μl/well, 30 min at 25±2° C. on a shaker) without washing between incubations. Plates were washed 3 times with PBS-Tween (0.05% Tween-80) after the second incubation using an automated plate washer. Subsequently, 150 μl/well 1×MSD Read buffer (MSD, #R92TC-1) was added and the plates were measured using a Sektor Imager 2400 device (MSD).

[0321] ECL signals of standard reference curve calibrator samples were plotted against the known BiTE antibody construct concentrations and fitted by a 5-PL fit (weighting 1/y2; Software: SoftMaxPro GxP 5.4). Unknown sample concentrations were back-calculated from this regression curve. All unknown samples were analyzed in triplicates with the respective means being reported. Molar concentrations were calculated from these results.

[0322] After the two-chamber assay, endothelial cell monolayers were stained as described in detail above and checked for their integrity by light microscopy.

[0323] Detection of CDH19- and CD33-BiTE antibody constructs was performed as described above. Detection of Cadherin-BiTE was performed as follows. In a first step, a recombinant soluble form of the BiTE target antigen (AMGEN) was immobilized on a carbon microtiter plate equipped with two electrodes (standard plate, MSD, #L15XA). To this end, plates were coated with 25 μl/well of a 1 μg/ml antibody solution overnight at 5±3° C. and then blocked with 150 μl/well of a 5% BSA solution for at least 1 h.

[0324] Samples were prepared as described above. 25 μl of each calibrator or unknown sample were added to individual wells and incubated for 1 h at 25±2° C. on a shaker. Plates were then washed 3 times with PBS-Tween (0.05% Tween-80) using an automated plate washer. BiTE antibody construct bound to the target antigen was detected via SulfoTag conjugated antibody, specific for the anti-CD3 binding part of BiTE antibodies (3E5.E1-Rut, AMGEN). The antibody was diluted to a final concentration of 1 μg/mL. 25 μL were added per well and incubated for 30 min at 25±2° C. on a shaker.

### Example 5

### Pharmacokinetics of BiTE Antibody Constructs

[0325] Four molecules named 1) 2G6-156; 2) 2G6-LFcBy; 3) 2G6-LFcBy-156; 4) 2G6-D3HSA were tested in the cynomolgus monkey in the context of a pharmacokinetic (PK) study. In this PK study a dose of 6 μg/kg was administered as a single intravenous bolus injection. For each of the above compounds, a group of 2 animals were used. Blood samples were collected and serum was prepared for determination of serum concentration for each drug in both animals. Serum drug levels were measured using an immunoassay. The serum concentration-time data were used to determine PK parameters. Blood sample was collected at the following time points: predose, 0.05, 0.25, 0.5, 1, 4, 8, 24, 48, 72, 168, 240, and 336 hours post dose. The PK parameters were determined using standard non-compartmental analysis (NCA) methods.

[0326] For all drugs tested, serum levels were quantifiable for the vast majority of time points in all animals after drug administration. The PK profiles showed a biphasic exponential decline for all drugs tested. Using NCA methods, the following parameters were estimated: AUC_{inf} (Area under the serum concentration-time curve), Vₛₛ (volume of distribution at steady state), CL (systemic clearance), MRT (mean residence time), and Terminal t_{1/2} (half-life estimated from terminal phase). The PK parameters (mean of n=2) of each compound tested are summarized below:

[0327] The AUC_{inf} was 568 hr*ng/mL, 366 hr*ng/mL, 1796 hr*ng/mL, and 1383 hr*ng/mL respectively for compounds 1, 2, 3 and 4. The Vₛₛ was 446 mL/kg, 594 mL/kg, 193 mL/kg, and 80.7 mL/kg respectively for compounds 1, 2, 3 and 4. Systemic clearance was 11.3 mL/hr/kg, 16.1 mL/hr/kg, 4.3 mL/hr/kg, and 4.9 mL/hr/kg respectively for compounds 1, 2, 3 and 4. The MRT value for compounds 1, 2, 3 and 4 were 42.3 hr, 39.8 hr, 48.7 hr, and 18.1 hr respectively and that for terminal half-life was 44.3 hr, 31.2 hr, 40.3 hr, and 13.5 hr respectively for compounds 1, 2, 3 and 4.

[0328] The terminal half-life and MRT of each of compounds 1, 2 and 3 were much higher (>2-folds) than those for compound 4. Compounds 1, 2 and 3 present a longer half-life version of BiTE antibody constructs.

[0329] Results see FIG. 10.

| SEQ | | | |
|---|---|---|---|
| ID NO: | Description | | |
| 1. | linear FcRn binding peptide | QRFVTGHFGGLXPANG | |
| 2. | linear FcRn binding peptide | QRFVTGHFGGLYPANG | |
| | Y | | |
| 3. | linear FcRn binding peptide | QRFVTGHFGGLHPANG | |
| | H | | |
| 4. | core FcRn binding peptide | TGHFGGLHP | |
| | H | | |
| 5. | cyclic FcRn binding peptide | QRFCTGHFGGLHPCNG | |
| | H | | |
| 6. | Peptide linker | GGGS | |
| 7. | human CD3 ε (1-27) | QDGNEEMGGITQTPYKVSISGTTVILT | |
| 8. | Callithrix jacchus CD3 ε | QDGNEEMGDTTQNPYKVSISGTTVTLT | |
| | (1-27) | | |
| 9. | Saguinus oedipus CD3 ε | QDGNEEMGDTTQNPYKVSISGTTVTLT | |
| | (1-27) | | |
| 10. | Saimiri sciureus CD3 ε | QDGNEEIGDTTQNPYKVSISGTTVTLT | |
| | (1-27) | | |
| 11. | N-terminus of CD3ε | QDGNE | |
| 12. | CDR-L1 of F6A | GSSTGAVTSGYYPN | |
| 13. | CDR-L2 of F6A | GTKFLAP | |
| 14. | CDR-L3 of F6A | ALWYSNRWV | |
| 15. | CDR-H1 of F6A | IYAMN | |
| 16. | CDR-H2 of F6A | RIRSKYNNYATYYADSVKS | |
| 17. | CDR-H3 of F6A | HGNFGNSYVSFFAY | |
| 18. | VH of F6A | EVQLVESGGGLVQPGGSLKLSCAASGFTFNIYAMNWVRQAPGKGLEWVARIRSKYNNYATYYA | |
| | | DSVKSRFTISRDDSKNTAYLQMNNLKTEDTAVYYCVRHGNFGNSYVSFFAYWGQGTLVTVSS | |
| 19. | VH of F6A | GAGGTGCAGCTGGTCGAGTCTGGAGGAGGATTGGTGCAGCCTGGAGGGTCATTGAAACTCTCA | |
| | | TGTGCAGCCTCTGGATTCACCTTCAATATCTACGCCATGAACTGGGTCCGCCAGGCTCCAGGA | |
| | | AAGGGTTTGGAATGGGTTGCTCGCATAAGAAGTAAATATAATAATTATGCAACATATTATGCC | |
| | | GATTCAGTGAAAAGCAGGTICACCATCTCCAGAGATGATTCAAAAAACACTGCCTATCTACAA | |
| | | ATGAACAACTTGAAAACTGAGGACACTGCCGTGTACTACTGTGTGAGACATGGGAACTTCGGT | |
| | | AATAGCTACGTATCCTTCTTCGCTTACTGGGGCCAAGGGACTCTGGTCACCGTCTCCTCA | |
| 20. | VL of F6A | QTVVTQEPSLTVSPGGTVTLTCGSSTGAVTSGYYPNWVQQKPGQAPRGLIGGTKFLAPGTPAR | |
| | | FSGSLLGGKAALTLSGVQPEDEAEYYCALWYSNRWVFGGGTKLTVL | |
| 21. | VL of F6A | CAGACTGTTGTGACTCAGGAACCTTCACTCACCGTATCACCTGGTGGAACAGTCACACTCACT | |
| | | TGIGGCTCCTCGACTGGGGCTGTTACATCTGGCTACTACCCAAACTGGGICCAACAAAAACCA | |
| | | GGTCAGGCACCCCGTGGTCTAATAGGTGGGACTAAGTTCCTCGCCCCCGGTACTCCTGCCAGA | |
| | | TTCTCAGGCTCCCTGCTTGGAGGCAAGGCTGCCCTCACCCTCTCAGGGGTACAGCCAGAGGAT | |
| | | GAGGCAGAATATTACTGTGCTCTATGGTACAGCAACCGCTGGGTGTTCGGTGGAGGAACCAAA | |
| | | CTGACTGTCCTA | |
| 22. | VH-VL of F6A | EVQLVESGGGLVQPGGSLKLSCAASGFTFNIYAMNWVRQAPGKGLEWVARIRSKYNNYATYYA | |
| | | DSVKSRFTISRDDSKNTAYLQMNNLKTEDTAVYYCVRHGNFGNSYVSFFAYWGQGTLVTVSSG | |
| | | GGGSGGGGSGGGGSQTVVTQEPSLIVSPGGIVTLICGSSTGAVISGYYPNWVQQKPGQAPRGL | |
| | | IGGTKFLAPGTPARFSGSLLGGKAALTLSGVQPEDEAEYYCALWYSNRWVFGGGTKLTVL | |
| 23. | VH-VL of F6A | GAGGTGCAGCTGGTCGAGTCTGGAGGAGGATTGGTGCAGCCTGGAGGGTCATTGAAACTCTCA | |
| | | TGTGCAGCCTCTGGATTCACCTTCAATATCTACGCCATGAACTGGGTCCGCCAGGCTCCAGGA | |
| | | AAGGGTTTGGAATGGGTTGCTCGCATAAGAAGTAAATATAATAATTATGCAACATATTATGCC | |
| | | GATTCAGTGAAAAGCAGGTTCACCATCTCCAGAGATGATTCAAAAAACACTGCCTATCTACAA | |
| | | ATGAACAACTTGAAAACTGAGGACACTGCCGTGTACTACTGTGTGAGACATGGGAACTTCGGT | |
| | | AATAGCTACGTATCCTTCTTCGCTTACTGGGGCCAAGGGACTCTGGTCACCGTCTCCTCAGGT | |
| | | GGTGGTGGTTCTGGCGGCGGCGGCTCCGGTGGTGGTGGTTCTCAGACTGTTGTGACTCAGGAA | |
| | | CCTTCACTCACCGTATCACCTGGTGGAACAGTCACACTCACTTGTGGCTCCTCGACTGGGGCT | |
| | | GTTACATCTGGCTACTACCCAAACTGGGICCAACAAAAACCAGGICAGGCACCCCGTGGICTA | |
| | | ATAGGTGGGACTAAGTTCCTCGCCCCCGGTACTCCTGCCAGATTCTCAGGCTCCCTGCTTGGA | |
| | | GGCAAGGCTGCCCTCACCCTCTCAGGGGTACAGCCAGAGGATGAGGCAGAATATTACTGTGCT | |
| | | CTATGGTACAGCAACCGCTGGGTGTTCGGTGGAGGAACCAAACTGACTGTCCTA | |
| 24. | CDR-L1 of H2C | GSSTGAVTSGYYPN | |
| 25. | CDR-L2 of H2C | GTKFLAP | |
| 26. | CDR-L3 of H2C | ALWYSNRWV | |
| 27. | CDR-H1 of H2C | KYAMN | |
| 28. | CDR-H2 of H2C | RIRSKYNNYATYYADSVKD | |
| 29. | CDR-H3 of H2C | HGNFGNSYISYWAY | |
| 30. | VH of H2C | EVQLVESGGGLVQPGGSLKLSCAASGFTFNKYAMNWVRQAPGKGLEWVARIRSKYNNYATYYA | |
| | | DSVKDRFTISRDDSKNTAYLQMNNLKTEDTAVYYCVRHGNFGNSYISYWAYWGQGTLVTVSS | |
| 31. | VH of H2C | GAGGTGCAGCTGGTCGAGTCTGGAGGAGGATTGGTGCAGCCTGGAGGGTCATTGAAACTCTCA | |
| | | TGTGCAGCCTCTGGATTCACCTTCAATAAGTACGCCATGAACTGGGTCCGCCAGGCTCCAGGA | |
| | | AAGGGTTTGGAATGGGTTGCTCGCATAAGAAGTAAATATAATAATTATGCAACATATTATGCC | |
| | | GATTCAGTGAAAGACAGGTICACCATCTCCAGAGATGATICAAAAAACACTGCCTATCTACAA | |
| | | ATGAACAACTTGAAAACTGAGGACACTGCCGTGTACTACTGTGTGAGACATGGGAACTTCGGT | |
| | | AATAGCTACATATCCTACTGGGCTTACTGGGGCCAAGGGACTCTGGTCACCGTCTCCTCA | |
| 32. | VL of H2C | QTVVTQEPSLIVSPGGIVTLICGSSTGAVISGYYPNWVQQKPGQAPRGLIGGTKFLAPGTPAR | |
| | | FSGSLLGGKAALTLSGVQPEDEAEYYCALWYSNRWVFGGGTKLTVL | |
| 33. | VL of H2C | CAGACTGTTGTGACTCAGGAACCTTCACTCACCGTATCACCTGGTGGAACAGTCACACTCACT | |
| | | TGTGGCTCCTCGACTGGGGCTGTTACATCTGGCTACTACCCAAACTGGGTCCAACAAAAACCA | |
| | | GGICAGGCACCCCGTGGICTAATAGGIGGGACTAAGITCCTCGCCCCCGGTACTCCTGCCAGA | |
| | | TTCTCAGGCTCCCTGCTTGGAGGCAAGGCTGCCCTCACCCTCTCAGGGGTACAGCCAGAGGAT | |
| | | GAGGCAGAATATTACTGTGCTCTATGGTACAGCAACCGCTGGGTGTTCGGTGGAGGAACCAAA | |
| | | CTGACTGTCCTA | |
| 34. | VH-VL of H2C | EVQLVESGGGLVQPGGSLKLSCAASGFTFNKYAMNWVRQAPGKGLEWVARIRSKYNNYATYYA | |
| | | DSVKDRFTISRDDSKNTAYLQMNNLKTEDTAVYYCVRHGNFGNSYISYWAYWGQGTLVTVSSG | |
| | | GGGSGGGGSGGGGSQTVVTQEPSLIVSPGGIVTLICGSSIGAVTSGYYPNWVQQKPGQAPRGL | |
| | | IGGTKFLAPGTPARFSGSLLGGKAALTLSGVQPEDEAEYYCALWYSNRWVFGGGTKLTVL | |
| 35. | VH-VL of H2C | GAGGTGCAGCTGGTCGAGTCTGGAGGAGGATTGGTGCAGCCTGGAGGGTCATTGAAACTCTCA | |
| | | TGTGCAGCCTCTGGATTCACCTTCAATAAGTACGCCATGAACTGGGTCCGCCAGGCTCCAGGA | |
| | | AAGGGTTTGGAATGGGTTGCTCGCATAAGAAGTAAATATAATAATTATGCAACATATTATGCC | |
| | | GATTCAGTGAAAGACAGGTTCACCATCTCCAGAGATGATTCAAAAAACACTGCCTATCTACAA | |
| | | ATGAACAACTTGAAAACTGAGGACACTGCCGTGTACTACTGTGTGAGACATGGGAACTTCGGT | |
| | | AATAGCTACATATCCTACTGGGCTTACTGGGGCCAAGGGACTCTGGTCACCGTCTCCTCAGGT | |
| | | GGTGGTGGTTCTGGCGGCGGCGGCTCCGGTGGTGGTGGTTCTCAGACTGTTGTGACTCAGGAA | |
| | | CCTTCACTCACCGTATCACCTGGTGGAACAGTCACACTCACTTGTGGCTCCTCGACTGGGGCT | |
| | | GTTACATCTGGCTACTACCCAAACTGGGTCCAACAAAAACCAGGTCAGGCACCCCGTGGTCTA | |
| | | ATAGGTGGGACTAAGTTCCTCGCCCCCGGTACTCCTGCCAGATTCTCAGGCTCCCTGCTTGGA | |
| | | GGCAAGGCTGCCCTCACCCTCTCAGGGGTACAGCCAGAGGATGAGGCAGAATATTACTGTGCT | |
| | | CTATGGTACAGCAACCGCTGGGIGTTCGGIGGAGGAACCAAACTGACTGICCIA | |
| 36. | CDR-L1 of H1E | GSSTGAVTSGYYPN | |
| 37. | CDR-L2 of H1E | GTKFLAP | |
| 38. | CDR-L3 of H1E | ALWYSNRWV | |
| 39. | CDR-H1 of H1E | SYAMN | |
| 40. | CDR-H2 of H1E | RIRSKYNNYATYYADSVKG | |
| 41. | CDR-H3 of H1E | HGNFGNSYLSFWAY | |
| 42. | VH of H1E | EVQLVESGGGLEQPGGSLKLSCAASGFTFNSYAMNWVRQAPGKGLEWVARIRSKYNNYATYYA | |
| | | DSVKGRFTISRDDSKNTAYLQMNNLKTEDTAVYYCVRHGNFGNSYLSFWAYWGQGTLVTVSS | |
| 43. | VH of H1E | GAGGTGCAGCTGGTCGAGTCTGGAGGAGGATTGGAGCAGCCTGGAGGGTCATTGAAACTCTCA | |
| | | TGTGCAGCCTCTGGATTCACCTTCAATTCGTACGCCATGAACTGGGTCCGCCAGGCTCCAGGA | |
| | | AAGGGTTTGGAATGGGTTGCTCGCATAAGAAGTAAATATAATAATTATGCAACATATTATGCC | |
| | | GATTCAGTGAAAGGGAGGTTCACCATCTCCAGAGATGATTCAAAAAACACTGCCTATCTACAA | |
| | | ATGAACAACTTGAAAACTGAGGACACTGCCGTGTACTACTGTGTGAGACATGGGAACTTCGGT | |
| | | AATAGCTACCTATCCTTCTGGGCTTACTGGGGCCAAGGGACTCTGGTCACCGTCTCCTC | |
| 44. | VL of H1E | QTVVIQEPSLIVSPGGIVTLICGSSTGAVISGYYPNWVQQKPGQAPRGLIGGIKFLAPGTPAR | |
| | | FSGSLLGGKAALTLSGVQPEDEAEYYCALWYSNRWVFGGGTKLTVL | |
| 45. | VL of H1E | CAGACTGTTGTGACTCAGGAACCTTCACTCACCGTATCACCTGGTGGAACAGTCACACTCACT | |
| | | TGIGGCTCCTCGACTGGGGCTGTTACATCTGGCTACTACCCAAACTGGGICCAACAAAAACCA | |
| | | GGTCAGGCACCCCGTGGTCTAATAGGTGGGACTAAGTTCCTCGCCCCCGGTACTCCTGCCAGA | |
| | | TTCTCAGGCTCCCTGCTTGGAGGCAAGGCTGCCCTCACCCTCTCAGGGGTACAGCCAGAGGAT | |
| | | GAGGCAGAATATTACTGTGCTCTATGGTACAGCAACCGCTGGGTGTTCGGTGGAGGAACCAAA | |
| | | CTGACTGTCCTA | |
| 46. | VH-VL of H1E | EVQLVESGGGLEQPGGSLKLSCAASGFTFNSYAMNWVRQAPGKGLEWVARIRSKYNNYATYYA | |
| | | DSVKGRFTISRDDSKNTAYLQMNNLKTEDTAVYYCVRHGNFGNSYLSFWAYWGQGTLVTVSSG | |
| | | GGGSGGGGSGGGGSQTVVTQEPSLIVSPGGIVTLTOGSSTGAVTSGYYPNWVQQKPGQAPRGL | |
| | | IGGTKFLAPGTPARFSGSLLGGKAALTLSGVQPEDEAEYYCALWYSNRWVFGGGTKLTVL | |
| 47. | VH-VL of H1E | GAGGTGCAGCTGGTCGAGTCTGGAGGAGGATTGGAGCAGCCTGGAGGGTCATTGAAACTCTCA | |
| | | TGTGCAGCCTCTGGATTCACCTTCAATTCGTACGCCATGAACTGGGTCCGCCAGGCTCCAGGA | |
| | | AAGGGTTTGGAATGGGTTGCTCGCATAAGAAGTAAATATAATAATTATGCAACATATTATGCC | |
| | | GATTCAGTGAAAGGGAGGTTCACCATCTCCAGAGATGATTCAAAAAACACTGCCTATCTACAA | |
| | | ATGAACAACTTGAAAACTGAGGACACTGCCGTGTACTACTGTGTGAGACATGGGAACTTCGGT | |
| | | AATAGCTACCTATCCTTCTGGGCTTACTGGGGCCAAGGGACTCTGGTCACCGTCTCCTCAGGT | |
| | | GGTGGTGGTTCTGGCGGCGGCGGCTCCGGTGGTGGTGGTTCTCAGACTGTTGTGACTCAGGAA | |
| | | CCTTCACTCACCGTATCACCTGGTGGAACAGTCACACTCACTTGTGGCTCCTCGACTGGGGCT | |
| | | GTTACATCTGGCTACTACCCAAACTGGGICCAACAAAAACCAGGICAGGCACCCCGTGGICTA | |
| | | ATAGGTGGGACTAAGTTCCTCGCCCCCGGTACTCCTGCCAGATTCTCAGGCTCCCTGCTTGGA | |
| | | GGCAAGGCTGCCCTCACCCICTCAGGGGIACAGCCAGAGGATGAGGCAGAATATTACTGTGCT | |
| | | CTATGGTACAGCAACCGCTGGGTGTTCGGTGGAGGAACCAAACTGACTGTCCTA | |
| 48. | CDR-L1 of G4H | GSSTGAVTSGYYPN | |
| 49. | CDR-L2 of G4H | GTKFLAP | |
| 50. | CDR-L3 of G4H | ALWYSNRWV | |
| 51. | CDR-H1 of G4H | RYAMN | |
| 52. | CDR-H2 of G4H | RIRSKYNNYATYYADSVKG | |
| 53. | CDR-H3 of G4H | HGNFGNSYLSYFAY | |
| 54. | VH of G4H | EVQLVESGGGLVQPGGSLKLSCAASGFTFNRYAMNWVRQAPGKGLEWVARIRSKYNNYATYYA | |
| | | DSVKGRFTISRDDSKNTAYLQMNNLKTEDTAVYYCVRHGNFGNSYLSYFAYWGQGTLVTVSS | |
| 55. | VH of G4H | GAGGTGCAGCTGGTCGAGTCTGGAGGAGGATTGGTGCAGCCTGGAGGGTCATTGAAACTCTCA | |
| | | TGTGCAGCCTCTGGATTCACCTTCAATCGCTACGCCATGAACTGGGTCCGCCAGGCTCCAGGA | |
| | | AAGGGTTTGGAATGGGTTGCTCGCATAAGAAGTAAATATAATAATTATGCAACATATTATGCC | |
| | | GATTCAGTGAAAGGGAGGTICACCATCTCCAGAGATGATTCAAAAAACACTGCCTATCTACAA | |
| | | ATGAACAACTTGAAAACTGAGGACACTGCCGTGTACTACTGTGTGAGACATGGGAACTTCGGT | |
| | | AATAGCTACTTATCCTACTTCGCTTACTGGGGCCAAGGGACTCTGGTCACCGTCTCCTCA | |
| 56. | VL of G4H | QTVVIQEPSLIVSPGGIVTLICGSSTGAVISGYYPNWVQQKPGQAPRGLIGGIKFLAPGTPAR | |
| | | FSGSLLGGKAALTLSGVQPEDEAEYYCALWYSNRWVFGGGTKLTVL | |
| 57. | VL of G4H | CAGACTGTTGTGACTCAGGAACCTTCACTCACCGTATCACCTGGTGGAACAGTCACACTCACT | |
| | | TGTGGCTCCTCGACTGGGGCTGTTACATCTGGCTACTACCCAAACTGGGTCCAACAAAAACCA | |
| | | GGTCAGGCACCCCGTGGTCTAATAGGTGGGACTAAGTTCCTCGCCCCCGGTACTCCTGCCAGA | |
| | | TTCTCAGGCTCCCTGCTTGGAGGCAAGGCTGCCCTCACCCTCTCAGGGGTACAGCCAGAGGAT | |
| | | GAGGCAGAATATTACTGTGCTCTATGGTACAGCAACCGCTGGGIGTTCGGIGGAGGAACCAAA | |
| | | CTGACTGTCCTA | |
| 58. | VH-VL of G4H | EVQLVESGGGLVQPGGSLKLSCAASGFTFNRYAMNWVRQAPGKGLEWVARIRSKYNNYATYYA | |
| | | DSVKGRFTISRDDSKNTAYLQMNNLKTEDTAVYYCVRHGNFGNSYLSYFAYWGQGTLVTVSSG | |
| | | GGGSGGGGSGGGGSQTVVTQEPSLTVSPGGTVTLTCGSSTGAVTSGYYPNWVQQKPGQAPRGL | |
| | | IGGTKFLAPGTPARFSGSLLGGKAALTLSGVQPEDEAEYYCALWYSNRWVFGGGTKLTVL | |
| 59. | VH-VL of G4H | GAGGTGCAGCTGGTCGAGTCTGGAGGAGGATTGGTGCAGCCTGGAGGGTCATTGAAACTCTCA | |
| | | TGTGCAGCCTCTGGATTCACCTTCAATCGCTACGCCATGAACTGGGTCCGCCAGGCTCCAGGA | |
| | | AAGGGTTTGGAATGGGTTGCTCGCATAAGAAGTAAATATAATAATTATGCAACATATTATGCC | |
| | | GATTCAGTGAAAGGGAGGTTCACCATCTCCAGAGATGATTCAAAAAACACTGCCTATCTACAA | |
| | | ATGAACAACTTGAAAACTGAGGACACTGCCGTGTACTACTGIGTGAGACATGGGAACTICGGT | |
| | | AATAGCTACTTATCCTACTTCGCTTACTGGGGCCAAGGGACTCTGGTCACCGTCTCCTCAGGT | |
| | | GGTGGTGGTTCTGGCGGCGGCGGCTCCGGTGGTGGTGGTTCTCAGACTGTTGTGACTCAGGAA | |
| | | CCTTCACTCACCGTATCACCTGGTGGAACAGTCACACTCACTTGTGGCTCCTCGACTGGGGCT | |
| | | GTTACATCTGGCTACTACCCAAACTGGGTCCAACAAAAACCAGGTCAGGCACCCCGTGGTCTA | |
| | | ATAGGTGGGACTAAGTTCCTCGCCCCCGGTACTCCTGCCAGATTCTCAGGCTCCCTGCTTGGA | |
| | | GGCAAGGCTGCCCTCACCCTCTCAGGGGTACAGCCAGAGGATGAGGCAGAATATTACTGTGCT | |
| | | CTATGGTACAGCAACCGCTGGGIGTTCGGIGGAGGAACCAAACTGACTGICCIA | |
| 60. | CDR-L1 of A2J | RSSTGAVTSGYYPN | |
| 61. | CDR-L2 of A2J | ATDMRPS | |
| 62. | CDR-L3 of A2J | ALWYSNRWV | |
| 63. | CDR-H1 of A2J | VYAMN | |
| 64. | CDR-H2 of A2J | RIRSKYNNYATYYADSVKK | |
| 65. | CDR-H3 of A2J | HGNFGNSYLSWWAY | |
| 66. | VH of A2J | EVQLVESGGGLVQPGGSLKLSCAASGFTFNVYAMNWVRQAPGKGLEWVARIRSKYNNYATYYA | |
| | | DSVKKRFTISRDDSKNTAYLQMNNLKTEDTAVYYCVRHGNFGNSYLSWWAYWGQGTLVTVSS | |
| 67. | VH of A2J | GAGGTGCAGCTGGTCGAGTCTGGAGGAGGATTGGTGCAGCCTGGAGGGTCATTGAAACTCTCA | |
| | | TGTGCAGCCTCTGGATTCACCTTCAATGTCTACGCCATGAACTGGGTCCGCCAGGCTCCAGGA | |
| | | AAGGGTTTGGAATGGGTTGCTCGCATAAGAAGTAAATATAATAATTATGCAACATATTATGCC | |
| | | GATTCAGTGAAAAAGAGGTTCACCATCTCCAGAGATGATTCAAAAAACACTGCCTATCTACAA | |
| | | ATGAACAACTTGAAAACTGAGGACACTGCCGTGTACTACTGTGTGAGACATGGGAACTTCGGT | |
| | | AATAGCTACTTATCCTGGTGGGCTTACTGGGGCCAAGGGACTCTGGTCACCGTCTCCTCA | |
| 68. | VL of A2J | QTVVIQEPSLIVSPGGIVTLICRSSTGAVISGYYPNWVQQKPGQAPRGLIGATDMRPSGTPAR | |
| | | FSGSLLGGKAALTLSGVQPEDEAEYYCALWYSNRWVFGGGTKLTVL | |
| 69. | VL of A2J | CAGACTGTTGTGACTCAGGAACCTTCACTCACCGTATCACCTGGTGGAACAGTCACACTCACT | |
| | | TGTCGCTCCTCGACTGGGGCTGTTACATCTGGCTACTACCCAAACTGGGTCCAACAAAAACCA | |
| | | GGTCAGGCACCCCGTGGTCTAATAGGTGCCACTGACATGAGGCCCTCTGGTACTCCTGCCAGA | |
| | | TTCTCAGGCTCCCTGCTTGGAGGCAAGGCTGCCCTCACCCTCTCAGGGGTACAGCCAGAGGAT | |
| | | GAGGCAGAATATTACTGTGCTCTATGGTACAGCAACCGCTGGGTGTTCGGTGGAGGAACCAAA | |
| | | CTGACTGTCCTA | |
| 70. | VH-VL of A2J | EVQLVESGGGLVQPGGSLKLSCAASGFTENVYAMNWVRQAPGKGLEWVARIRSKYNNYATYYA | |
| | | DSVKKRFTISRDDSKNTAYLQMNNLKTEDTAVYYCVRHGNEGNSYLSWWAYWGQGTLVTVSSG | |
| | | GGGSGGGGSGGGGSQTVVTQEPSLIVSPGGIVTLICRSSIGAVTSGYYPNWVQQKPGQAPRGL | |
| | | IGATDMRPSGTPARFSGSLLGGKAALTLSGVQPEDEAEYYCALWYSNRWVEGGGTKLTVL | |
| 71. | VH-VL of A2J | GAGGTGCAGCTGGTCGAGTCTGGAGGAGGATTGGTGCAGCCTGGAGGGTCATTGAAACTCTCA | |
| | | TGTGCAGCCTCTGGATTCACCTTCAATGTCTACGCCATGAACTGGGTCCGCCAGGCTCCAGGA | |
| | | AAGGGTTTGGAATGGGTTGCTCGCATAAGAAGTAAATATAATAATTATGCAACATATTATGCC | |
| | | GATTCAGTGAAAAAGAGGTTCACCATCTCCAGAGATGATTCAAAAAACACTGCCTATCTACAA | |
| | | ATGAACAACTTGAAAACTGAGGACACTGCCGTGTACTACTGTGTGAGACATGGGAACTTCGGT | |
| | | AATAGCTACTTATCCTGGTGGGCTTACTGGGGCCAAGGGACTCTGGTCACCGTCTCCTCAGGT | |
| | | GGTGGTGGTTCTGGCGGCGGCGGCTCCGGTGGTGGTGGTTCTCAGACTGTTGTGACTCAGGAA | |
| | | CCTTCACTCACCGTATCACCTGGTGGAACAGTCACACTCACTTGTCGCTCCTCGACTGGGGCT | |
| | | GTTACATCTGGCTACTACCCAAACTGGGTCCAACAAAAACCAGGTCAGGCACCCCGTGGTCTA | |
| | | ATAGGTGCCACTGACATGAGGCCCTCTGGTACTCCTGCCAGATTCTCAGGCTCCCTGCTTGGA | |
| | | GGCAAGGCTGCCCTCACCCTCTCAGGGGTACAGCCAGAGGATGAGGCAGAATATTACTGTGCT | |
| | | CTATGGTACAGCAACCGCTGGGTGTTCGGTGGAGGAACCAAACTGACTGTCCTA | |
| 72. | CDR-L1 of E1L | GSSTGAVTSGYYPN | |
| 73. | CDR-L2 of E1L | GTKFLAP | |
| 74. | CDR-L3 of E1L | ALWYSNRWV | |
| 75. | CDR-H1 of E1L | KYAMN | |
| 76. | CDR-H2 of E1L | RIRSKYNNYATYYADSVKS | |
| 77. | CDR-H3 of E1L | HGNFGNSYTSYYAY | |
| 78. | VH of E1L | EVQLVESGGGLVQPGGSLKLSCAASGFTENKYAMNWVRQAPGKGLEWVARIRSKYNNYATYYA | |
| | | DSVKSRFTISRDDSKNTAYLQMNNLKTEDTAVYYCVRHGNEGNSYTSYYAYWGQGTLVTVSS | |
| 79. | VH of E1L | GAGGTGCAGCTGGTCGAGTCTGGAGGAGGATTGGTGCAGCCTGGAGGGTCATTGAAACTCTCA | |
| | | TGTGCAGCCTCTGGATTCACCTTCAATAAGTACGCCATGAACTGGGTCCGCCAGGCTCCAGGA | |
| | | AAGGGTTTGGAATGGGTTGCTCGCATAAGAAGTAAATATAATAATTATGCAACATATTATGCC | |
| | | GATTCAGTGAAATCGAGGTTCACCATCTCCAGAGATGATTCAAAAAACACTGCCTATCTACAA | |
| | | ATGAACAACTTGAAAACTGAGGACACTGCCGTGTACTACTGTGTGAGACATGGGAACTTCGGT | |
| | | AATAGCTACACATCCTACTACGCTTACTGGGGCCAAGGGACTCTGGTCACCGTCTCCTCA | |
| 80. | VL of E1L | QTVVTQEPSLTVSPGGTVTLTCGSSTGAVTSGYYPNWVQQKPGQAPRGLIGGTKFLAPGTPAR | |
| | | FSGSLLGGKAALTLSGVQPEDEAEYYCALWYSNRWVFGGGTKLTVL | |
| 81. | VL of E1L | CAGACTGTTGTGACTCAGGAACCTTCACTCACCGTATCACCTGGTGGAACAGTCACACTCACT | |
| | | TGTGGCTCCTCGACTGGGGCTGTTACATCTGGCTACTACCCAAACTGGGTCCAACAAAAACCA | |
| | | GGICAGGCACCCCGTGGICTAATAGGIGGGACTAAGITCCTCGCCCCCGGTACTCCTGCCAGA | |
| | | TTCTCAGGCTCCCTGCTTGGAGGCAAGGCTGCCCTCACCCTCTCAGGGGTACAGCCAGAGGAT | |
| | | GAGGCAGAATATTACTGTGCTCTATGGTACAGCAACCGCTGGGIGTTCGGIGGAGGAACCAAA | |
| | | CTGACTGTCCTA | |
| 82. | VH-VL of E1L | EVQLVESGGGLVQPGGSLKLSCAASGFTFNKYAMNWVRQAPGKGLEWVARIRSKYNNYATYYA | |
| | | DSVKSRFTISRDDSKNTAYLQMNNLKTEDTAVYYCVRHGNFGNSYTSYYAYWGQGTLVTVSSG | |
| | | GGGSGGGGSGGGGSQTVVTQEPSLIVSPGGIVTLICGSSTGAVISGYYPNWVQQKPGQAPRGL | |
| | | IGGTKFLAPGTPARFSGSLLGGKAALTLSGVQPEDEAEYYCALWYSNRWVFGGGTKLTVL | |
| 83. | VH-VL of E1L | GAGGTGCAGCTGGTCGAGTCTGGAGGAGGATTGGTGCAGCCTGGAGGGTCATTGAAACTCTCA | |
| | | TGTGCAGCCTCTGGATTCACCTTCAATAAGTACGCCATGAACTGGGTCCGCCAGGCTCCAGGA | |
| | | AAGGGTTTGGAATGGGTTGCTCGCATAAGAAGTAAATATAATAATTATGCAACATATTATGCC | |
| | | GATTCAGTGAAATCGAGGTTCACCATCTCCAGAGATGATTCAAAAAACACTGCCTATCTACAA | |
| | | ATGAACAACTTGAAAACTGAGGACACTGCCGTGTACTACTGTGTGAGACATGGGAACTTCGGT | |
| | | AATAGCTACACATCCTACTACGCTTACTGGGGCCAAGGGACTCTGGTCACCGTCTCCTCAGGT | |
| | | GGTGGTGGTTCTGGCGGCGGCGGCTCCGGTGGTGGTGGTTCTCAGACTGTTGTGACTCAGGAA | |
| | | CCTTCACTCACCGTATCACCTGGTGGAACAGTCACACTCACTTGTGGCTCCTCGACTGGGGCT | |
| | | GTTACATCTGGCTACTACCCAAACTGGGICCAACAAAAACCAGGICAGGCACCCCGTGGICIA | |
| | | ATAGGTGGGACTAAGTTCCTCGCCCCCGGTACTCCTGCCAGATTCTCAGGCTCCCTGCTTGGA | |
| | | GGCAAGGCTGCCCTCACCCTCTCAGGGGTACAGCCAGAGGATGAGGCAGAATATTACTGTGCT | |
| | | CTATGGTACAGCAACCGCTGGGTGTTCGGTGGAGGAACCAAACTGACTGTCCTA | |
| 84. | CDR-L1 of E2M | RSSTGAVTSGYYPN | |
| 85. | CDR-L2 of E2M | ATDMRPS | |
| 86. | CDR-L3 of E2M | ALWYSNRWV | |
| 87. | CDR-H1 of E2M | GYAMN | |
| 88. | CDR-H2 of E2M | RIRSKYNNYATYYADSVKE | |
| 89. | CDR-H3 of E2M | HRNFGNSYLSWFAY | |
| 90. | VH of E2M | EVQLVESGGGLVQPGGSLKLSCAASGFTFNGYAMNWVRQAPGKGLEWVARIRSKYNNYATYYA | |
| | | DSVKERFTISRDDSKNTAYLQMNNLKTEDTAVYYCVRHRNFGNSYLSWFAYWGQGTLVTVSS | |
| 91. | VH of E2M | GAGGTGCAGCTGGTCGAGTCTGGAGGAGGATTGGTGCAGCCTGGAGGGTCATTGAAACTCTCA | |
| | | TGTGCAGCCTCTGGATTCACCTTCAATGGCTACGCCATGAACTGGGTCCGCCAGGCTCCAGGA | |
| | | AAGGGTTTGGAATGGGTTGCTCGCATAAGAAGTAAATATAATAATTATGCAACATATTATGCC | |
| | | GATTCAGTGAAAGAGAGGTTCACCATCTCCAGAGATGATTCAAAAAACACTGCCTATCTACAA | |
| | | ATGAACAACTTGAAAACTGAGGACACTGCCGTGTACTACTGIGTGAGACATAGGAACTICGGT | |
| | | AATAGCTACTTATCCTGGTTCGCTTACTGGGGCCAAGGGACTCTGGTCACCGTCTCCTCA | |
| 92. | VL of E2M | QTVVIQEPSLIVSPGGIVTLICRSSTGAVISGYYPNWVQQKPGQAPRGLIGATDMRPSGTPAR | |
| | | FSGSLLGGKAALTLSGVQPEDEAEYYCALWYSNRWVFGGGTKLTVL | |
| 93. | VL of E2M | CAGACTGTTGTGACTCAGGAACCTTCACTCACCGTATCACCTGGTGGAACAGTCACACTCACT | |
| | | TGTCGCTCCTCGACTGGGGCTGTTACATCTGGCTACTACCCAAACTGGGTCCAACAAAAACCA | |
| | | GGTCAGGCACCCCGTGGTCTAATAGGTGCCACTGACATGAGGCCCTCTGGTACTCCTGCCAGA | |
| | | TTCTCAGGCTCCCTGCTTGGAGGCAAGGCTGCCCTCACCCTCTCAGGGGTACAGCCAGAGGAT | |
| | | GAGGCAGAATATTACTGTGCTCTATGGTACAGCAACCGCTGGGTGTTCGGTGGAGGAACCAAA | |
| | | CTGACTGTCCTA | |
| 94. | VH-VL of E2M | EVQLVESGGGLVQPGGSLKLSCAASGFTFNGYAMNWVRQAPGKGLEWVARIRSKYNNYATYYA | |
| | | DSVKERFTISRDDSKNTAYLQMNNLKTEDTAVYYCVRHRNFGNSYLSWFAYWGQGTLVTVSSG | |
| | | GGGSGGGGSGGGGSQTVVTQEPSLIVSPGGIVTLICRSSTGAVISGYYPNWVQQKPGQAPRGL | |
| | | IGATDMRPSGTPARFSGSLLGGKAALTLSGVQPEDEAEYYCALWYSNRWVFGGGTKLTVL | |
| 95. | VH-VL of E2M | GAGGTGCAGCTGGTCGAGTCTGGAGGAGGATTGGTGCAGCCTGGAGGGTCATTGAAACTCTCA | |
| | | TGTGCAGCCTCTGGATTCACCTTCAATGGCTACGCCATGAACTGGGTCCGCCAGGCTCCAGGA | |
| | | AAGGGTTTGGAATGGGTTGCTCGCATAAGAAGTAAATATAATAATTATGCAACATATTATGCC | |
| | | GATTCAGTGAAAGAGAGGTICACCATCTCCAGAGATGATTCAAAAAACACTGCCTATCTACAA | |
| | | ATGAACAACTTGAAAACTGAGGACACTGCCGTGTACTACTGIGTGAGACATAGGAACTICGGT | |
| | | AATAGCTACTTATCCTGGTTCGCTTACTGGGGCCAAGGGACTCTGGTCACCGTCTCCTCAGGT | |
| | | GGTGGTGGTTCTGGCGGCGGCGGCTCCGGTGGTGGTGGTTCTCAGACTGTTGTGACTCAGGAA | |
| | | CCTTCACTCACCGTATCACCTGGTGGAACAGTCACACTCACTTGTCGCTCCTCGACTGGGGCT | |
| | | GTTACATCTGGCTACTACCCAAACTGGGTCCAACAAAAACCAGGTCAGGCACCCCGTGGTCTA | |
| | | ATAGGTGCCACTGACATGAGGCCCTCTGGTACTCCTGCCAGATTCTCAGGCTCCCTGCTTGGA | |
| | | GGCAAGGCTGCCCTCACCCICTCAGGGGIACAGCCAGAGGATGAGGCAGAATATTACTGTGCT | |
| | | CTATGGTACAGCAACCGCTGGGTGTTCGGTGGAGGAACCAAACTGACTGTCCTA | |
| 96. | CDR-L1 of F70 | GSSTGAVTSGYYPN | |
| 97. | CDR-L2 of F70 | GTKFLAP | |
| 98. | CDR-L3 of F70 | ALWYSNRWV | |
| 99. | CDR-H1 of F70 | VYAMN | |
| 100. | CDR-H2 of F70 | RIRSKYNNYATYYADSVKK | |
| 101. | CDR-H3 of F70 | HGNFGNSYISWWAY | |
| 102. | VH of F70 | EVQLVESGGGLVQPGGSLKLSCAASGFTFNVYAMNWVRQAPGKGLEWVARIRSKYNNYATYYA | |
| | | DSVKKRFTISRDDSKNTAYLQMNNLKTEDTAVYYCVRHGNFGNSYISWWAYWGQGTLVTVSS | |
| 103. | VH of F70 | GAGGTGCAGCTGGTCGAGTCTGGAGGAGGATTGGTGCAGCCTGGAGGGTCATTGAAACTCTCA | |
| | | TGTGCAGCCTCTGGATTCACCTTCAATGTGTACGCCATGAACTGGGTCCGCCAGGCTCCAGGA | |
| | | AAGGGTTTGGAATGGGTTGCTCGCATAAGAAGTAAATATAATAATTATGCAACATATTATGCC | |
| | | GATTCAGTGAAAAAGAGGTICACCATCTCCAGAGATGATTCAAAAAACACTGCCTATCTACAA | |
| | | ATGAACAACTTGAAAACTGAGGACACTGCCGTGTACTACTGTGTGAGACATGGGAACTTCGGT | |
| | | AATAGCTACATATCCTGGTGGGCTTACTGGGGCCAAGGGACTCTGGTCACCGTCTCCTCA | |
| 104. | VL of F70 | QTVVIQEPSLIVSPGGIVTLICGSSTGAVISGYYPNWVQQKPGQAPRGLIGGIKFLAPGTPAR | |
| | | FSGSLLGGKAALTLSGVQPEDEAEYYCALWYSNRWVFGGGTKLTVL | |
| 105. | VL of F70 | CAGACTGTTGTGACTCAGGAACCTTCACTCACCGTATCACCTGGTGGAACAGTCACACTCACT | |
| | | TGTGGCTCCTCGACTGGGGCTGTTACATCTGGCTACTACCCAAACTGGGTCCAACAAAAACCA | |
| | | GGTCAGGCACCCCGTGGTCTAATAGGTGGGACTAAGTTCCTCGCCCCCGGTACTCCTGCCAGA | |
| | | TTCTCAGGCTCCCTGCTTGGAGGCAAGGCTGCCCTCACCCTCTCAGGGGTACAGCCAGAGGAT | |
| | | GAGGCAGAATATTACTGTGCTCTATGGTACAGCAACCGCTGGGTGTTCGGTGGAGGAACCAAA | |
| | | CTGACTGTCCTA | |
| 106. | VH-VL of F70 | EVQLVESGGGLVQPGGSLKLSCAASGFTFNVYAMNWVRQAPGKGLEWVARIRSKYNNYATYYA | |
| | | DSVKKRFTISRDDSKNTAYLQMNNLKTEDTAVYYCVRHGNFGNSYISWWAYWGQGTLVTVSSG | |
| | | GGGSGGGGSGGGGSQTVVTQEPSLIVSPGGIVTLICGSSTGAVISGYYPNWVQQKPGQAPRGL | |
| | | IGGTKFLAPGTPARFSGSLLGGKAALTLSGVQPEDEAEYYCALWYSNRWVFGGGTKLTVL | |
| 107. | VH-VL of F70 | GAGGTGCAGCTGGTCGAGTCTGGAGGAGGATTGGTGCAGCCTGGAGGGTCATTGAAACTCTCA | |
| | | TGTGCAGCCTCTGGATTCACCTTCAATGTGTACGCCATGAACTGGGTCCGCCAGGCTCCAGGA | |
| | | AAGGGTTTGGAATGGGTTGCTCGCATAAGAAGTAAATATAATAATTATGCAACATATTATGCC | |
| | | GATTCAGTGAAAAAGAGGTTCACCATCTCCAGAGATGATTCAAAAAACACTGCCTATCTACAA | |
| | | ATGAACAACTTGAAAACTGAGGACACTGCCGTGTACTACTGIGTGAGACATGGGAACTICGGT | |
| | | AATAGCTACATATCCTGGTGGGCTTACTGGGGCCAAGGGACTCTGGTCACCGTCTCCTCAGGT | |
| | | GGTGGTGGTTCTGGCGGCGGCGGCTCCGGTGGTGGTGGTTCTCAGACTGTTGTGACTCAGGAA | |
| | | CCTTCACTCACCGTATCACCTGGTGGAACAGTCACACTCACTTGTGGCTCCTCGACTGGGGCT | |
| | | GTTACATCTGGCTACTACCCAAACTGGGTCCAACAAAAACCAGGTCAGGCACCCCGTGGTCTA | |
| | | ATAGGTGGGACTAAGTTCCTCGCCCCCGGTACTCCTGCCAGATTCTCAGGCTCCCTGCTTGGA | |
| | | GGCAAGGCTGCCCTCACCCICTCAGGGGIACAGCCAGAGGATGAGGCAGAATATTACTGTGCT | |
| | | CTATGGTACAGCAACCGCTGGGTGTTCGGTGGAGGAACCAAACTGACTGTCCTA | |
| 108. | CDR-L1 of F12Q | GSSTGAVTSGNYPN | |
| 109. | CDR-L2 of F12Q | GTKFLAP | |
| 110. | CDR-L3 of F12Q | VLWYSNRWV | |
| 111. | CDR-H1 of F12Q | SYAMN | |
| 112. | CDR-H2 of F12Q | RIRSKYNNYATYYADSVKG | |
| 113. | CDR-H3 of F12Q | HGNFGNSYVSWWAY | |
| 114. | VH of F12Q | EVQLVESGGGLVQPGGSLKLSCAASGFTFNSYAMNWVRQAPGKGLEWVARIRSKYNNYATYYA | |
| | | DSVKGRFTISRDDSKNTAYLQMNNLKTEDTAVYYCVRHGNFGNSYVSWWAYWGQGTLVTVSS | |
| 115. | VH of F12Q | GAGGTGCAGCTGGTCGAGTCTGGAGGAGGATTGGTGCAGCCTGGAGGGTCATTGAAACTCTCA | |
| | | TGTGCAGCCTCTGGATTCACCTTCAATAGCTACGCCATGAACTGGGTCCGCCAGGCTCCAGGA | |
| | | AAGGGTTTGGAATGGGTTGCTCGCATAAGAAGTAAATATAATAATTATGCAACATATTATGCC | |
| | | GATTCAGTGAAAGGCAGGTTCACCATCTCCAGAGATGATTCAAAAAACACTGCCTATCTACAA | |
| | | ATGAACAACTTGAAAACTGAGGACACTGCCGTGTACTACTGTGTGAGACATGGGAACTTCGGT | |
| | | AATAGCTACGTTTCCTGGTGGGCTTACTGGGGCCAAGGGACTCTGGTCACCGTCTCCTCA | |
| 116. | VL of F12Q | QTVVIQEPSLIVSPGGIVTLICGSSTGAVISGNYPNWVQQKPGQAPRGLIGGIKFLAPGTPAR | |
| | | FSGSLLGGKAALTLSGVQPEDEAEYYCVLWYSNRWVFGGGTKLTVL | |
| 117. | VL of F12Q | CAGACTGTTGTGACTCAGGAACCTTCACTCACCGTATCACCTGGTGGAACAGTCACACTCACT | |
| | | TGIGGCTCCTCGACTGGGGCTGTTACATCTGGCAACTACCCAAACTGGGICCAACAAAAACCA | |
| | | GGTCAGGCACCCCGTGGTCTAATAGGTGGGACTAAGTTCCTCGCCCCCGGTACTCCTGCCAGA | |
| | | TTCTCAGGCTCCCTGCTTGGAGGCAAGGCTGCCCTCACCCTCTCAGGGGTACAGCCAGAGGAT | |
| | | GAGGCAGAATATTACTGTGTTCTATGGTACAGCAACCGCTGGGTGTTCGGTGGAGGAACCAAA | |
| | | CTGACTGTCCTA | |
| 118. | VH-VL of F12Q | EVQLVESGGGLVQPGGSLKLSCAASGFTFNSYAMNWVRQAPGKGLEWVARIRSKYNNYATYYA | |
| | | DSVKGRFTISRDDSKNTAYLQMNNLKTEDTAVYYCVRHGNFGNSYVSWWAYWGQGTLVTVSSG | |
| | | GGGSGGGGSGGGGSQTVVTQEPSLIVSPGGIVTLICGSSTGAVISGNYPNWVQQKPGQAPRGL | |
| | | IGGTKFLAPGTPARFSGSLLGGKAALTLSGVQPEDEAEYYCVLWYSNRWVFGGGTKLTVL | |
| 119. | VH-VL of F12Q | GAGGTGCAGCTGGTCGAGTCTGGAGGAGGATTGGTGCAGCCTGGAGGGTCATTGAAACTCTCA | |
| | | TGTGCAGCCTCTGGATTCACCTTCAATAGCTACGCCATGAACTGGGTCCGCCAGGCTCCAGGA | |
| | | AAGGGTTTGGAATGGGTTGCTCGCATAAGAAGTAAATATAATAATTATGCAACATATTATGCC | |
| | | GATTCAGTGAAAGGCAGGTTCACCATCTCCAGAGATGATTCAAAAAACACTGCCTATCTACAA | |
| | | ATGAACAACTTGAAAACTGAGGACACTGCCGTGTACTACTGIGTGAGACATGGGAACTICGGT | |
| | | AATAGCTACGTTTCCTGGTGGGCTTACTGGGGCCAAGGGACTCTGGTCACCGTCTCCTCAGGT | |
| | | GGTGGTGGTTCTGGCGGCGGCGGCTCCGGTGGTGGTGGTTCTCAGACTGTTGTGACTCAGGAA | |
| | | CCTTCACTCACCGTATCACCTGGTGGAACAGTCACACTCACTTGTGGCTCCTCGACTGGGGCT | |
| | | GTTACATCTGGCAACTACCCAAACTGGGTCCAACAAAAACCAGGTCAGGCACCCCGTGGTCTA | |
| | | ATAGGTGGGACTAAGTTCCTCGCCCCCGGTACTCCTGCCAGATTCTCAGGCTCCCTGCTTGGA | |
| | | GGCAAGGCTGCCCTCACCCTCTCAGGGGTACAGCCAGAGGATGAGGCAGAATATTACTGTGTT | |
| | | CTATGGTACAGCAACCGCTGGGIGTTCGGIGGAGGAACCAAACTGACTGICCIA | |
| 120. | CDR-L1 of I2C | GSSTGAVTSGNYPN | |
| 121. | CDR-L2 of I2C | GTKFLAP | |
| 122. | CDR-L3 of I2C | VLWYSNRWV | |
| 123. | CDR-H1 of I2C | KYAMN | |
| 124. | CDR-H2 of I2C | RIRSKYNNYATYYADSVKD | |
| 125. | CDR-H3 of I2C | HGNFGNSYISYWAY | |
| 126. | VH of I2C | EVQLVESGGGLVQPGGSLKLSCAASGFTFNKYAMNWVRQAPGKGLEWVARIRSKYNNYATYYA | |
| | | DSVKDRFTISRDDSKNTAYLQMNNLKTEDTAVYYCVRHGNFGNSYISYWAYWGQGTLVTVSS | |
| 127. | VH of I2C | GAGGTGCAGCTGGTCGAGTCTGGAGGAGGATTGGTGCAGCCTGGAGGGTCATTGAAACTCTCA | |
| | | TGTGCAGCCTCTGGATTCACCTTCAATAAGTACGCCATGAACTGGGTCCGCCAGGCTCCAGGA | |
| | | AAGGGTTTGGAATGGGTTGCTCGCATAAGAAGTAAATATAATAATTATGCAACATATTATGCC | |
| | | GATTCAGTGAAAGACAGGTTCACCATCTCCAGAGATGATTCAAAAAACACTGCCTATCTACAA | |
| | | ATGAACAACTTGAAAACTGAGGACACTGCCGTGTACTACTGTGTGAGACATGGGAACTTCGGT | |
| | | AATAGCTACATATCCTACTGGGCTTACTGGGGCCAAGGGACTCTGGTCACCGTCTCCTCA | |
| 128. | VL of I2C | QTVVTQEPSLTVSPGGTVTLTCGSSTGAVTSGNYPNWVQQKPGQAPRGLIGGTKFLAPGTPAR | |
| | | FSGSLLGGKAALTLSGVQPEDEAEYYCVLWYSNRWVFGGGTKLTVL | |
| 129. | VL of I2C | CAGACTGTTGTGACTCAGGAACCTTCACTCACCGTATCACCTGGTGGAACAGTCACACTCACT | |
| | | TGTGGCTCCTCGACTGGGGCTGTTACATCTGGCAACTACCCAAACTGGGTCCAACAAAAACCA | |
| | | GGICAGGCACCCCGTGGICTAATAGGIGGGACTAAGITCCTCGCCCCCGGTACTCCTGCCAGA | |
| | | TTCTCAGGCTCCCTGCTTGGAGGCAAGGCTGCCCTCACCCTCTCAGGGGTACAGCCAGAGGAT | |
| | | GAGGCAGAATATTACTGTGTTCTATGGTACAGCAACCGCTGGGTGTTCGGTGGAGGAACCAAA | |
| | | CTGACTGTCCTA | |
| 130. | VH-VL of I2C | EVQLVESGGGLVQPGGSLKLSCAASGFTFNKYAMNWVRQAPGKGLEWVARIRSKYNNYATYYA | |
| | | DSVKDRFTISRDDSKNTAYLQMNNLKTEDTAVYYCVRHGNFGNSYISYWAYWGQGTLVTVSSG | |
| | | GGGSGGGGSGGGGSQTVVTQEPSLIVSPGGIVTLICGSSTGAVISGNYPNWVQQKPGQAPRGL | |
| | | IGGTKFLAPGTPARFSGSLLGGKAALTLSGVQPEDEAEYYCVLWYSNRWVFGGGTKLTVL | |
| 131. | VH-VL of I2C | GAGGTGCAGCTGGTCGAGTCTGGAGGAGGATTGGTGCAGCCTGGAGGGTCATTGAAACTCTCA | |
| | | TGTGCAGCCTCTGGATTCACCTTCAATAAGTACGCCATGAACTGGGTCCGCCAGGCTCCAGGA | |
| | | AAGGGTTTGGAATGGGTTGCTCGCATAAGAAGTAAATATAATAATTATGCAACATATTATGCC | |
| | | GATTCAGTGAAAGACAGGTTCACCATCTCCAGAGATGATTCAAAAAACACTGCCTATCTACAA | |
| | | ATGAACAACTTGAAAACTGAGGACACTGCCGTGTACTACTGTGTGAGACATGGGAACTTCGGT | |
| | | AATAGCTACATATCCTACTGGGCTTACTGGGGCCAAGGGACTCTGGTCACCGTCTCCTCAGGT | |
| | | GGTGGTGGTTCTGGCGGCGGCGGCTCCGGTGGTGGTGGTTCTCAGACTGTTGTGACTCAGGAA | |
| | | CCTTCACTCACCGTATCACCTGGTGGAACAGTCACACTCACTTGTGGCTCCTCGACTGGGGCT | |
| | | GTTACATCTGGCAACTACCCAAACTGGGTCCAACAAAAACCAGGTCAGGCACCCCGTGGTCTA | |
| | | ATAGGTGGGACTAAGTTCCTCGCCCCCGGTACTCCTGCCAGATTCTCAGGCTCCCTGCTTGGA | |
| | | GGCAAGGCTGCCCTCACCCTCTCAGGGGTACAGCCAGAGGATGAGGCAGAATATTACTGTGTT | |
| | | CTATGGTACAGCAACCGCTGGGTGTTCGGTGGAGGAACCAAACTGACTGTCCTA | |
| 132. | CDH19 14302 x I2C- | QRFVTGHFGGLYPANGGGGGSQVQLVESGGGVVQPGGSLRLSCAASGFTFSSYGMHWVRQAPG | |
| | LFcBY | KGLEWVAFIWYDGSNKYYADSVKDRFTISRDNSKNTLYLQMNSLRAEDTAVYYCARRAGIIGT | |
| | SEQ ID 1572 of | IGYYYGMDVWGQGTTVTVSSGGGGSGGGGSGGGGSSYELTQPPSVSVSPGQTASITCSGDRLG | |
| | PCT/EP2014/051550 | EKYTSWYQQRPGQSPLLVIYQDTKRPSGIPERFSGSNSGNTATLTISGTQAMDEADYYCQAWE | |
| | | SSTVVFGGGTKLIVLSGGGGSEVQLVESGGGLVQPGGSLKLSCAASGFTENKYAMNWVRQAPG | |
| | | KGLEWVARIRSKYNNYATYYADSVKDRFTISRDDSKNTAYLQMNNLKTEDTAVYYCVRHGNFG | |
| | | NSYISYWAYWGQGTLVTVSSGGGGSGGGGSGGGGSQTVVTQEPSLTVSPGGTVTLTCGSSTGA | |
| | | VTSGNYPNWVQQKPGQAPRGLIGGTKFLAPGTPARFSGSLLGGKAALTLSGVQPEDEAEYYCV | |
| | | LWYSNRWVEGGGTKLTVLGGGGSQRFCTGHFGGLHPCNGHHHHHH | |
| 133. | CDH19 14302 x I2C- | QRFVTGHFGGLYPANGGGGGSQVQLVESGGGVVQPGGSLRLSCAASGFTFSSYGMHWVRQAPG | |
| | LFcBY-156 | KGLEWVAFIWYDGSNKYYADSVKDRFTISRDNSKNTLYLQMNSLRAEDTAVYYCARRAGIIGT | |
| | SEQ ID 1573 of | IGYYYGMDVWGQGTTVTVSSGGGGSGGGGSGGGGSSYELTQPPSVSVSPGQTASITCSGDRLG | |
| | PCT/EP2014/051550 | EKYTSWYQQRPGQSPLLVIYQDTKRPSGIPERFSGSNSGNTATLTISGTQAMDEADYYCQAWE | |
| | | SSTVVFGGGTKLTVLSGGGGSEVQLVESGGGLVQPGGSLKLSCAASGFTFNKYAMNWVRQAPG | |
| | | KGLEWVARIRSKYNNYATYYADSVKDRFTISRDDSKNTAYLQMNNLKTEDTAVYYCVRHGNFG | |
| | | NSYISYWAYWGQGTLVTVSSGGGGSGGGGSGGGGSQTVVTQEPSLTVSPGGTVTLTCGSSTGA | |
| | | VTSGNYPNWVQQKPGQAPRGLIGGTKFLAPGTPARFSGSLLGGKAALTLSGVQPEDEAEYYCV | |
| | | LWYSNRWVFGGGTKLTVLGGGGS | |
| | | QRFCTGHFGGLHPCNGGGGGSGGGSRDWDFDVFGGGTPVGGHHHHHH | |
| 134. | CDH19 14302 CC x I2C- | QRFVTGHFGGLYPANGGGGGSQVQLVESGGGVVQPGGSLRLSCAASGFTFSSYGMHWVRQAPG | |
| | LFcBY | KCLEWVAFIWYDGSNKYYADSVKDRFTISRDNSKNTLYLQMNSLRAEDTAVYYCARRAGIIGT | |
| | SEQ ID 2219 of | IGYYYGMDVWGQGTTVTVSSGGGGSGGGGSGGGGSSYELTQPPSVSVSPGQTASITCSGDRLG | |
| | PCT/EP2014/051550 | EKYTSWYQQRPGQSPLLVIYQDTKRPSGIPERFSGSNSGNTATLTISGTQAMDEADYYCQAWE | |
| | | SSTVVFGCGTKLIVLSGGGGSEVQLVESGGGLVQPGGSLKLSCAASGFTFNKYAMNWVRQAPG | |
| | | KGLEWVARIRSKYNNYATYYADSVKDRFTISRDDSKNTAYLQMNNLKTEDTAVYYCVRHGNFG | |
| | | NSYISYWAYWGQGTLVTVSSGGGGSGGGGSGGGGSQTVVTQEPSLTVSPGGTVTLTCGSSTGA | |
| | | VTSGNYPNWVQQKPGQAPRGLIGGTKFLAPGTPARFSGSLLGGKAALTLSGVQPEDEAEYYCV | |
| | | LWYSNRWVFGGGTKLTVLGGGGSQRFCTGHFGGLHPCNGHHHHHH | |
| 135. | CDH19 14302 CC x I2C- | QRFVTGHFGGLYPANGGGGGSQVQLVESGGGVVQPGGSLRLSCAASGFTFSSYGMHWVRQAPG | |
| | LFcBY-156 | KCLEWVAFIWYDGSNKYYADSVKDRFTISRDNSKNTLYLQMNSLRAEDTAVYYCARRAGIIGT | |
| | SEQ ID 2220 of | IGYYYGMDVWGQGTTVTVSSGGGGSGGGGSGGGGSSYELTQPPSVSVSPGQTASITCSGDRLG | |
| | PCT/EP2014/051550 | EKYTSWYQQRPGQSPLLVIYQDTKRPSGIPERFSGSNSGNTATLTISGTQAMDEADYYCQAWE | |
| | | SSTVVFGCGTKLTVLSGGGGSEVQLVESGGGLVQPGGSLKLSCAASGFTFNKYAMNWVRQAPG | |
| | | KGLEWVARIRSKYNNYATYYADSVKDRFTISRDDSKNTAYLQMNNLKTEDTAVYYCVRHGNFG | |
| | | NSYISYWAYWGQGTLVTVSSGGGGSGGGGSGGGGSQTVVTQEPSLTVSPGGTVTLICGSSTGA | |
| | | VTSGNYPNWVQQKPGQAPRGLIGGTKFLAPGTPARFSGSLLGGKAALTLSGVQPEDEAEYYCV | |
| | | LWYSNRWVFGGGTKLTVLGGGGSQRFCTGHFGGLHPCNGGGGGSGGGS | |
| | | RDWDFDVFGGGTPVGGHHHHHH | |
| 136. | CH19_2G6_302xI2C6 | QVQLVESGGGVVQPGGSLRLSCAASGFTFSSYGMHWVRQAPGKGLEWVAFIWYDGSNKYYADS | |
| | | VKDRFTISRDNSKNTLYLQMNSLRAEDTAVYYCARRAGIIGTIGYYYGMDVWGQGTTVTVSSG | |
| | | GGGSGGGGSGGGGSSYELTQPPSVSVSPGQTASITCSGDRLGEKYTSWYQQRPGQSPLLVIYQ | |
| | | DTKRPSGIPERFSGSNSGNTATLTISGTQAMDEADYYCQAWESSTVVFGGGTKLTVLSGGGGS | |
| | | EVQLVESGGGLVQPGGSLKLSCAASGFTFNKYAMNWVRQAPGKGLEWVARIRSKYNNYATYYA | |
| | | DSVKDRFTISRDDSKNTAYLQMNNLKTEDTAVYYCVRHGNFGNSYISYWAYWGQGTLVTVSSG | |
| | | GGGSGGGGSGGGGSQTVVTQEPSLTVSPGGTVTLICGSSTGAVTSGNYPNWVQQKPGQAPRGL | |
| | | IGGTKFLAPGTPARFSGSLLGGKAALTLSGVQPEDEAEYYCVLWYSNRWVFGGGTKLTVLHHH | |
| | | HHH | |
| 137. | CH19_2G6_302xI2C6-156 | QVQLVESGGGVVQPGGSLRLSCAASGFTFSSYGMHWVRQAPGKGLEWVAFIWYDGSNKYYADS | |
| | | VKDRFTISRDNSKNTLYLQMNSLRAEDTAVYYCARRAGIIGTIGYYYGMDVWGQGTTVTVSSG | |
| | | GGGSGGGGSGGGGSSYELTQPPSVSVSPGQTASITCSGDRLGEKYTSWYQQRPGQSPLLVIYQ | |
| | | DTKRPSGIPERFSGSNSGNTATLTISGTQAMDEADYYCQAWESSTVVFGGGTKLTVLSGGGGS | |
| | | EVQLVESGGGLVQPGGSLKLSCAASGFTFNKYAMNWVRQAPGKGLEWVARIRSKYNNYATYYA | |
| | | DSVKDRFTISRDDSKNTAYLQMNNLKTEDTAVYYCVRHGNFGNSYISYWAYWGQGTLVTVSSG | |
| | | GGGSGGGGSGGGGSQTVVTQEPSLIVSPGGIVTLICGSSTGAVISGNYPNWVQQKPGQAPRGL | |
| | | IGGTKFLAPGTPARFSGSLLGGKAALTLSGVQPEDEAEYYCVLWYSNRWVFGGGTKLTVLGGG | |
| | | GSGGGSRDWDFDVFGGGTPVGGHHHHHH | |
| 138. | CH19_2G6_302xI2C6-D3 | QVQLVESGGGVVQPGGSLRLSCAASGFTFSSYGMHWVRQAPGKGLEWVAFIWYDGSNKYYADS | |
| | | VKDRFTISRDNSKNTLYLQMNSLRAEDTAVYYCARRAGIIGTIGYYYGMDVWGQGTTVTVSSG | |
| | | GGGSGGGGSGGGGSSYELTQPPSVSVSPGQTASITCSGDRLGEKYTSWYQQRPGQSPLLVIYQ | |
| | | DTKRPSGIPERFSGSNSGNTATLTISGTQAMDEADYYCQAWESSTVVFGGGTKLTVLSGGGGS | |
| | | EVQLVESGGGLVQPGGSLKLSCAASGFTFNKYAMNWVRQAPGKGLEWVARIRSKYNNYATYYA | |
| | | DSVKDRFTISRDDSKNTAYLQMNNLKTEDTAVYYCVRHGNFGNSYISYWAYWGQGTLVTVSSG | |
| | | GGGSGGGGSGGGGSQTVVTQEPSLIVSPGGIVTLICGSSTGAVISGNYPNWVQQKPGQAPRGL | |
| | | IGGTKFLAPGTPARFSGSLLGGKAALTLSGVQPEDEAEYYCVLWYSNRWVFGGGTKLTVLGGG | |
| | | GSEEPQNLIKQNCELFEQLGEYKFQNALLVRYTKKVPQVSTPTLVEVSRNLGKVGSKCCKHPE | |
| | | AKRMPCAEDYLSVVLNQLCVLHEKTPVSDRVTKCCTESLVNRRPCFSALEVDETYVPKEFNAE | |
| | | TFTFHADICTLSEKERQIKKQTALVELVKHKPKATKEQLKAVMDDFAAFVEKCCKADDKETCF | |
| | | AEEGKKLVAASQAALGLDYHHHHHH | |
| 139. | CH19_2G6_302xI2C6-LH- | QRFVIGHEGGLHPANGGGGGSQVQLVESGGGVVQPGGSLRLSCAASGFTESSYGMHWVRQAPG | |
| | FcB-CH | KGLEWVAFIWYDGSNKYYADSVKDRFTISRDNSKNTLYLQMNSLRAEDTAVYYCARRAGIIGT | |
| | | IGYYYGMDVWGQGTTVTVSSGGGGSGGGGSGGGGSSYELTQPPSVSVSPGQTASITCSGDRLG | |
| | | EKYTSWYQQRPGQSPLLVIYQDTKRPSGIPERFSGSNSGNTATLTISGTQAMDEADYYCQAWE | |
| | | SSTVVFGGGTKLTVLSGGGGSEVQLVESGGGLVQPGGSLKLSCAASGFTENKYAMNWVRQAPG | |
| | | KGLEWVARIRSKYNNYATYYADSVKDRFTISRDDSKNTAYLQMNNLKTEDTAVYYCVRHGNFG | |
| | | NSYISYWAYWGQGTLVTVSSGGGGSGGGGSGGGGSQTVVTQEPSLTVSPGGTVTLTCGSSTGA | |
| | | VTSGNYPNWVQQKPGQAPRGLIGGTKFLAPGTPARFSGSLLGGKAALTLSGVQPEDEAEYYCV | |
| | | LWYSNRWVFGGGTKLTVLGGGGSQRFCTGHFGGLHPCNGHHHHHH | |
| 140. | CH19_2G6_302xI2C6-LH- | QRFVTGHFGGLHPANGGGGGSQVQLVESGGGVVQPGGSLRLSCAASGFTFSSYGMHWVRQAPG | |
| | FcB-LH | KGLEWVAFIWYDGSNKYYADSVKDRFTISRDNSKNTLYLQMNSLRAEDTAVYYCARRAGIIGT | |
| | | IGYYYGMDVWGQGTTVTVSSGGGGSGGGGSGGGGSSYELTQPPSVSVSPGQTASITCSGDRLG | |
| | | EKYTSWYQQRPGQSPLLVIYQDTKRPSGIPERFSGSNSGNTATLTISGTQAMDEADYYCQAWE | |
| | | SSTVVFGGGTKLIVLSGGGGSEVQLVESGGGLVQPGGSLKLSCAASGFTENKYAMNWVRQAPG | |
| | | KGLEWVARIRSKYNNYATYYADSVKDRFTISRDDSKNTAYLQMNNLKTEDTAVYYCVRHGNFG | |
| | | NSYISYWAYWGQGTLVTVSSGGGGSGGGGSGGGGSQTVVTQEPSLTVSPGGTVTLTCGSSTGA | |
| | | VTSGNYPNWVQQKPGQAPRGLIGGTKFLAPGTPARFSGSLLGGKAALTLSGVQPEDEAEYYCV | |
| | | LWYSNRWVFGGGTKLTVLGGGGSQRFVTGHFGGLHPANGHHHHHH | |
| 141. | CH19_2G6_302xI2C6-LY- | QRFVTGHFGGLYPANGGGGGSQVQLVESGGGVVQPGGSLRLSCAASGFTFSSYGMHWVRQAPG | |
| | FcB-LH | KGLEWVAFIWYDGSNKYYADSVKDRFTISRDNSKNTLYLQMNSLRAEDTAVYYCARRAGIIGT | |
| | | IGYYYGMDVWGQGTTVTVSSGGGGSGGGGSGGGGSSYELTQPPSVSVSPGQTASITCSGDRLG | |
| | | EKYTSWYQQRPGQSPLLVIYQDTKRPSGIPERFSGSNSGNTATLTISGTQAMDEADYYCQAWE | |
| | | SSTVVFGGGTKLIVLSGGGGSEVQLVESGGGLVQPGGSLKLSCAASGFTENKYAMNWVRQAPG | |
| | | KGLEWVARIRSKYNNYATYYADSVKDRFTISRDDSKNTAYLQMNNLKTEDTAVYYCVRHGNFG | |
| | | NSYISYWAYWGQGTLVTVSSGGGGSGGGGSGGGGSQTVVTQEPSLTVSPGGTVTLTCGSSTGA | |
| | | VTSGNYPNWVQQKPGQAPRGLIGGTKFLAPGTPARFSGSLLGGKAALTLSGVQPEDEAEYYCV | |
| | | LWYSNRWVEGGGIKLTVLGGGGSQRFVTGHFGGLHPANGHHHHHH | |
| 142. | CH19_2G6_302xI2C6- | QVQLVESGGGVVQPGGSLRLSCAASGFTFSSYGMHWVRQAPGKGLEWVAFIWYDGSNKYYADS | |
| | HALBwD | VKDRFTISRDNSKNTLYLQMNSLRAEDTAVYYCARRAGIIGTIGYYYGMDVWGQGTTVTVSSG | |
| | | GGGSGGGGSGGGGSSYELTQPPSVSVSPGQTASITCSGDRLGEKYTSWYQQRPGQSPLLVIYQ | |
| | | DTKRPSGIPERFSGSNSGNTATLTISGTQAMDEADYYCQAWESSTVVFGGGTKLTVLSGGGGS | |
| | | EVQLVESGGGLVQPGGSLKLSCAASGFTFNKYAMNWVRQAPGKGLEWVARIRSKYNNYATYYA | |
| | | DSVKDRFTISRDDSKNTAYLQMNNLKTEDTAVYYCVRHGNFGNSYISYWAYWGQGTLVTVSSG | |
| | | GGGSGGGGSGGGGSQTVVTQEPSLIVSPGGIVTLICGSSTGAVISGNYPNWVQQKPGQAPRGL | |
| | | IGGTKFLAPGTPARFSGSLLGGKAALTLSGVQPEDEAEYYCVLWYSNRWVFGGGTKLTVLPGG | |
| | | DGSDAHKSEVAHRFKDLGEENFKALVLIAFAQYLQQCPFEDHVKLVNEVTEFAKTCVADESAE | |
| | | NCDKSLHTLFGDKLCTVATLRETYGEMADCCAKQEPERNECFLQHKDDNPNLPRLVRPEVDVM | |
| | | CTAFHDNEETFLKKYLYEIARRHPYFYAPELLFFAKRYKAAFTECCQAADKAACLLPKLDELR | |
| | | DEGKASSAKQRLKCASLQKFGERAFKAWAVARLSQRFPKAEFAEVSKLVTDLTKVHTECCHGD | |
| | | LLECADDRADLAKYICENQDSISSKLKECCEKPLLEKSHCIAEVENDEMPADLPSLAADFVES | |
| | | KDVCKNYAEAKDVFLGMFLYEYARRHPDYSVVLLLRLAKTYETTLEKCCAAADPHECYAKVFD | |
| | | EFKPLVEEPQNLIKQNCELFEQLGEYKFQNALLVRYTKKVPQVSTPTLVEVSRNLGKVGSKCC | |
| | | KHPEAKRMPCAEDYLSVVLNQLCVLHEKTPVSDRVTKCCTESLVNRRPCFSALEVDETYVPKE | |
| | | FNAETFTFHADICTLSEKERQIKKQTALVELVKHKPKATKEQLKAVMDDFAAFVEKCCKADDK | |
| | | ETCFAEEGKKLVAASQAALGLHHHHHH | |
| 143. | CH19_2G6_302xI2C6-CH- | QRFCTGHFGGLHPCNGGGGGSQVQLVESGGGVVQPGGSLRLSCAASGFTFSSYGMHWVRQAPG | |
| | FcB-LH | KGLEWVAFIWYDGSNKYYADSVKDRFTISRDNSKNTLYLQMNSLRAEDTAVYYCARRAGIIGT | |
| | | IGYYYGMDVWGQGTTVTVSSGGGGSGGGGSGGGGSSYELTQPPSVSVSPGQTASITCSGDRLG | |
| | | EKYTSWYQQRPGQSPLLVIYQDTKRPSGIPERFSGSNSGNTATLIISGTQAMDEADYYCQAWE | |
| | | SSTVVFGGGTKLIVLSGGGGSEVQLVESGGGLVQPGGSLKLSCAASGFTENKYAMNWVRQAPG | |
| | | KGLEWVARIRSKYNNYATYYADSVKDRFTISRDDSKNTAYLQMNNLKTEDTAVYYCVRHGNFG | |
| | | NSYISYWAYWGQGTLVTVSSGGGGSGGGGSGGGGSQTVVTQEPSLTVSPGGTVTLTCGSSTGA | |
| | | VTSGNYPNWVQQKPGQAPRGLIGGTKFLAPGTPARFSGSLLGGKAALTLSGVQPEDEAEYYCV | |
| | | LWYSNRWVFGGGTKLTVLGGGGSQRFVTGHFGGLHPANGHHHHHH | |
| 144. | CH19_2G6_302xI2C6-CH- | QRFCIGHFGGLHPCNGGGGGSQVQLVESGGGVVQPGGSLRLSCAASGFTESSYGMHWVRQAPG | |
| | FcB-LY | KGLEWVAFIWYDGSNKYYADSVKDRFTISRDNSKNTLYLQMNSLRAEDTAVYYCARRAGIIGT | |
| | | IGYYYGMDVWGQGTTVTVSSGGGGSGGGGSGGGGSSYELTQPPSVSVSPGQTASITCSGDRLG | |
| | | EKYTSWYQQRPGQSPLLVIYQDTKRPSGIPERFSGSNSGNTATLIISGTQAMDEADYYCQAWE | |
| | | SSTVVFGGGTKLIVLSGGGGSEVQLVESGGGLVQPGGSLKLSCAASGFTENKYAMNWVRQAPG | |
| | | KGLEWVARIRSKYNNYATYYADSVKDRFTISRDDSKNTAYLQMNNLKTEDTAVYYCVRHGNFG | |
| | | NSYISYWAYWGQGTLVTVSSGGGGSGGGGSGGGGSQTVVTQEPSLTVSPGGTVTLTCGSSTGA | |
| | | VTSGNYPNWVQQKPGQAPRGLIGGTKFLAPGTPARFSGSLLGGKAALTLSGVQPEDEAEYYCV | |
| | | LWYSNRWVEGGGTKLTVLGGGGSQRFVTGHFGGLYPANGHHHHHH | |
| 145. | CH19_2G6_302xI2C6-CH- | QRFCIGHFGGLHPCNGGGGGSQVQLVESGGGVVQPGGSLRLSCAASGFTESSYGMHWVRQAPG | |
| | FcB-CH | KGLEWVAFIWYDGSNKYYADSVKDRFTISRDNSKNTLYLQMNSLRAEDTAVYYCARRAGIIGT | |
| | | IGYYYGMDVWGQGTTVTVSSGGGGSGGGGSGGGGSSYELTQPPSVSVSPGQTASITCSGDRLG | |
| | | EKYTSWYQQRPGQSPLLVIYQDTKRPSGIPERFSGSNSGNTATLTISGTQAMDEADYYCQAWE | |
| | | SSTVVFGGGTKLIVLSGGGGSEVQLVESGGGLVQPGGSLKLSCAASGFTENKYAMNWVRQAPG | |
| | | KGLEWVARIRSKYNNYATYYADSVKDRFTISRDDSKNTAYLQMNNLKTEDTAVYYCVRHGNFG | |
| | | NSYISYWAYWGQGTLVTVSSGGGGSGGGGSGGGGSQTVVTQEPSLTVSPGGTVTLTCGSSTGA | |
| | | VTSGNYPNWVQQKPGQAPRGLIGGTKFLAPGTPARFSGSLLGGKAALTLSGVQPEDEAEYYCV | |
| | | LWYSNRWVFGGGTKLTVLGGGGSQRFCTGHFGGLHPCNGHHHHHH | |
| 146. | CH19_2G6_302_VKGxI2C6- | QRFVTGHFGGLYPANGGGGGSQVQLVESGGGVVQPGGSLRLSCAASGFTFSSYGMHWVRQAPG | |
| | LFcBY | KGLEWVAFIWYDGSNKYYADSVKGRFTISRDNSKNTLYLQMNSLRAEDTAVYYCARRAGIIGT | |
| | | IGYYYGMDVWGQGTTVTVSSGGGGSGGGGSGGGGSSYELTQPPSVSVSPGQTASITCSGDRLG | |
| | | EKYTSWYQQRPGQSPLLVIYQDTKRPSGIPERFSGSNSGNTATLIISGTQAMDEADYYCQAWE | |
| | | SSTVVFGGGTKLTVLSGGGGSEVQLVESGGGLVQPGGSLKLSCAASGFTFNKYAMNWVRQAPG | |
| | | KGLEWVARIRSKYNNYATYYADSVKDRFTISRDDSKNTAYLQMNNLKTEDTAVYYCVRHGNFG | |
| | | NSYISYWAYWGQGTLVTVSSGGGGSGGGGSGGGGSQTVVTQEPSLTVSPGGTVTLTCGSSTGA | |
| | | VTSGNYPNWVQQKPGQAPRGLIGGTKFLAPGTPARFSGSLLGGKAALTLSGVQPEDEAEYYCV | |
| | | LWYSNRWVEGGGIKLTVLGGGGSQRFCTGHFGGLHPCNGHHHHHH | |
| 147. | CH19_0-E11xI2C6-LFcBY | QRFVTGHFGGLYPANGGGGGSQVQLQESGPGLVKPSQTLSLTCTVSGGSISRGGYYWSWIRQH | |
| | | PGKGLEWIGYIFYRGRTYYNPSLKSRVTISVDTSKNQFSLKLSSVTAADTAVYYCARVNSNYG | |
| | | WFDPWGQGTLVTVSSGGGGSGGGGSGGGGSEIVLTQFPGILSLSPGERATLSCRASQSVSSSY | |
| | | LAWYQQKPGQAPRLLIYGASSRATGIPDRFSGSGSGIDFTLTISRLEPEDFAVYYCQQYGSSP | |
| | | LTFGGGTKLEIKSGGGGSEVQLVESGGGLVQPGGSLKLSCAASGFTFNKYAMNWVRQAPGKGL | |
| | | EWVARIRSKYNNYATYYADSVKDRFTISRDDSKNTAYLQMNNLKTEDTAVYYCVRHGNFGNSY | |
| | | ISYWAYWGQGTLVTVSSGGGGSGGGGSGGGGSQTVVTQEPSLTVSPGGTVTLTCGSSTGAVTS | |
| | | GNYPNWVQQKPGQAPRGLIGGTKFLAPGTPARFSGSLLGGKAALTLSGVQPEDEAEYYCVLWY | |
| | | SNRWVFGGGTKLTVLGGGGSQRFCTGHFGGLHPCNGHHHHHH | |
| 148. | CH19_5-G4xI2C6-LFcBY | QRFVTGHFGGLYPANGGGGGSQVQLQESGPGLVKPSQTLSLTCTVSGGSISSGGYYWSWIRQH | |
| | | PGKGLEWIGYIFYRGRTYYNPSLKSRVTISVDTSKNQFSLKLSSVTAADTAVYYCARVYSNYG | |
| | | WFDPWGQGTLVTVSSGGGGSGGGGSGGGGSEIVLIQSPGILSLSPGERATLSCRASQSVSSSY | |
| | | LAWYQQKPGQAPRLLIYGTSNRATGIPDRFSGSGSGIDFTLTISRLEPEDFAVYYCQQYGSSP | |
| | | LTFGGGTKLEIKSGGGGSEVQLVESGGGLVQPGGSLKLSCAASGFTFNKYAMNWVRQAPGKGL | |
| | | EWVARIRSKYNNYATYYADSVKDRFTISRDDSKNTAYLQMNNLKTEDTAVYYCVRHGNFGNSY | |
| | | ISYWAYWGQGTLVTVSSGGGGSGGGGSGGGGSQTVVTQEPSLTVSPGGTVTLTCGSSTGAVTS | |
| | | GNYPNWVQQKPGQAPRGLIGGTKFLAPGTPARFSGSLLGGKAALTLSGVQPEDEAEYYCVLWY | |
| | | SNRWVFGGGTKLTVLGGGGSQRFCTGHFGGLHPCNGHHHHHH | |
| 149. | CH19_8-H6xI2C6-LFcBY | QRFVTGHFGGLYPANGGGGGSQVQLQESGPGLVKPSQTLSLTCTVSGGSISSGGYYWSWIRQH | |
| | | PGKGLEWIGYIFYSGRTYYNPSLKSRVTISVDTSKNQFSLKLSSVTAADTAVYYCARVYSNYG | |
| | | WFDPWGQGTLVTVSSGGGGSGGGGSGGGGSEIVLTQSPGTLSLSPGERATLSCRASQSVSSSY | |
| | | LAWYQQKPGQAPRLLIYGASSRATGIPDRFSGSGSGTDFTLTISRLEPEDFAVYYCQQYGSSP | |
| | | LTFGGGTKLEIKSGGGGSEVQLVESGGGLVQPGGSLKLSCAASGFTFNKYAMNWVRQAPGKGL | |
| | | EWVARIRSKYNNYATYYADSVKDRFTISRDDSKNTAYLQMNNLKTEDTAVYYCVRHGNFGNSY | |
| | | ISYWAYWGQGTLVTVSSGGGGSGGGGSGGGGSQTVVTQEPSLTVSPGGTVTLTCGSSTGAVTS | |
| | | GNYPNWVQQKPGQAPRGLIGGTKFLAPGIPARFSGSLLGGKAALTLSGVQPEDEAEYYCVLWY | |
| | | SNRWVFGGGTKLIVLGGGGSQRFCIGHFGGLHPCNGHHHHHH | |
| 150. | CH19_2-C11xI2C6-LFcBY | QRFVTGHFGGLYPANGGGGGSQVQLQESGPGLVKPSQTLSLTCTVSGGSISSGGYYWSWIRQH | |
| | | PGKGLEWIGYIFYSGRTYYNPSLKSRVTISVDTSKNQFSLKLRSVTAADTAVYYCARVYSNYG | |
| | | WFDPWGQGTLVTVSSGGGGSGGGGSGGGGSEIVLIQSPGILSLSPGERATLSCRASQSVSSSY | |
| | | LAWYQQKPGQAPRLLIYGASSRATGIPDRFSGSGSGTDFTLTISRLEPEDFAVYYCQQYGSSP | |
| | | LTFGGGTKLEIKSGGGGSEVQLVESGGGLVQPGGSLKLSCAASGFTFNKYAMNWVRQAPGKGL | |
| | | EWVARIRSKYNNYATYYADSVKDRFTISRDDSKNTAYLQMNNLKTEDTAVYYCVRHGNFGNSY | |
| | | ISYWAYWGQGTLVTVSSGGGGSGGGGSGGGGSQTVVTQEPSLTVSPGGTVTLTCGSSTGAVTS | |
| | | GNYPNWVQQKPGQAPRGLIGGTKFLAPGTPARFSGSLLGGKAALTLSGVQPEDEAEYYCVLWY | |
| | | SNRWVFGGGTKLTVLGGGGSQRFCTGHFGGLHPCNGHHHHHH | |
| 151. | CH19_2-A10xI2C6-LFcBY | QRFVTGHFGGLYPANGGGGGSQVQLQESGPGLVKPSQTLSLTCTVSGGSISSGGYYWSWIRQH | |
| | | PGKGLEWIGYIYYSGSTFYNPSLRSRVTISVDTSKNQFSLKLSSVTAADTAVYYCARDSSSSR | |
| | | ALDYWGQGTLVTVSSGGGGSGGGGSGGGGSEIVLIQSPGILSLSPGERATLSCRASQSVSSSY | |
| | | LAWYQQKPGQAPRLLIYGASSRATGIPDRFSGSGSGTDFTLTISRLEPEDFAVYYCQQYDSSP | |
| | | RTFGQGTKLEIKSGGGGSEVQLVESGGGLVQPGGSLKLSCAASGFTFNKYAMNWVRQAPGKGL | |
| | | EWVARIRSKYNNYATYYADSVKDRFTISRDDSKNTAYLQMNNLKTEDTAVYYCVRHGNFGNSY | |
| | | ISYWAYWGQGTLVTVSSGGGGSGGGGSGGGGSQTVVTQEPSLTVSPGGTVTLTCGSSTGAVTS | |
| | | GNYPNWVQQKPGQAPRGLIGGTKFLAPGIPARFSGSLLGGKAALTLSGVQPEDEAEYYCVLWY | |
| | | SNRWVFGGGTKLIVLGGGGSQRFCIGHFGGLHPCNGHHHHHH | |
| 152. | CH19_1-D11xI2C6-LFcBY | QRFVTGHFGGLYPANGGGGGSQVQLQESGPGLVKPSQTLSLTCTVSGGSISSGGYYWSWIRQH | |
| | | PGKGLEWIGYIYYRGRTYYNPSLKSRVTISVDTSKNQFSLKLSSVTAADTAVYYCARVYSNYG | |
| | | WFDPWGQGTLVTVSSGGGGSGGGGSGGGGSEIVLIQSPGILSLSPGERATLSCRASQSVSSSY | |
| | | LAWYQQKPGQAPRLLIYGASSRATGIPDRFSGSGSGTDFTLTISRLEPEDFAVYYCQQYGSSP | |
| | | LTFGGGTKLEIKSGGGGSEVQLVESGGGLVQPGGSLKLSCAASGFTFNKYAMNWVRQAPGKGL | |
| | | EWVARIRSKYNNYATYYADSVKDRFTISRDDSKNTAYLQMNNLKTEDTAVYYCVRHGNFGNSY | |
| | | ISYWAYWGQGTLVTVSSGGGGSGGGGSGGGGSQTVVTQEPSLTVSPGGTVTLICGSSTGAVIS | |
| | | GNYPNWVQQKPGQAPRGLIGGTKFLAPGTPARFSGSLLGGKAALTLSGVQPEDEAEYYCVLWY | |
| | | SNRWVFGGGTKLTVLGGGGSQRFCTGHFGGLHPCNGHHHHHH | |
| 153. | CH19_9-F9xI2C6-LFcBY | QRFVTGHFGGLYPANGGGGGSQVQLQESGPGLVKPSETLSLICTVSGGSISSGGYYWSWIRQH | |
| | | PGKGLEWIGYIFYRGRTYYNPSLKSRVTISVDTSKNQFSLKLSSVTAADTAVYYCARVYSNYG | |
| | | WFDPWGQGTLVTVSSGGGGSGGGGSGGGGSEIVLIQSPGILSLSPGERATLSCRASQSVSSSY | |
| | | LAWYQQKPGQAPRLLIYGASSRATGIPDRFSGSGSGTDFTLTISRLEPEDFAVYYCQQYGSSP | |
| | | TFGGGTKVEIKSGGGGSEVQLVESGGGLVQPGGSLKLSCAASGFIFNKYAMNWVRQAPGKGLE | |
| | | WVARIRSKYNNYATYYADSVKDRFTISRDDSKNTAYLQMNNLKTEDTAVYYCVRHGNFGNSYI | |
| | | SYWAYWGQGTLVTVSSGGGGSGGGGSGGGGSQTVVTQEPSLTVSPGGTVTLTCGSSTGAVTSG | |
| | | NYPNWVQQKPGQAPRGLIGGIKFLAPGTPARFSGSLLGGKAALTLSGVQPEDEAEYYCVLWYS | |
| | | NRWVFGGGTKLTVLGGGGSQRFCTGHFGGLHPCNGHHHHHH | |
| 154. | CH19_1-H8xI2C6-LFcBY | QRFVTGHFGGLYPANGGGGGSQVQLQESGPGLVKPSQTLSLTCTVSGGSISSGGYYWSWIRQH | |
| | | PGKGLEWIGYIFYRGRTYYNPSLKSRVTISVDTSKNQFSLKLSSVTAADTAVYYCARVYSNYG | |
| | | WFDPWGQGTLVTVSSGGGGSGGGGSGGGGSEIVLIQSPGILSLSPGERATLSCRASQSVSSSY | |
| | | LAWYQQKPGQAPRLLIYGASSRATGIPDRFSGSGSGTDFTLTISRLEPEDFAVYYCQQYGSSP | |
| | | LTFGGGTKVEIKSGGGGSEVQLVESGGGLVQPGGSLKLSCAASGFTFNKYAMNWVRQAPGKGL | |
| | | EWVARIRSKYNNYATYYADSVKDRFTISRDDSKNTAYLQMNNLKTEDTAVYYCVRHGNFGNSY | |
| | | ISYWAYWGQGTLVTVSSGGGGSGGGGSGGGGSQTVVIQEPSLIVSPGGIVTLICGSSTGAVIS | |
| | | GNYPNWVQQKPGQAPRGLIGGTKFLAPGTPARFSGSLLGGKAALTLSGVQPEDEAEYYCVLWY | |
| | | SNRWVFGGGTKLIVLGGGGSQRFCIGHFGGLHPCNGHHHHHH | |
| 155. | CH19_1-B12xI2C6-LFcBY | QRFVTGHFGGLYPANGGGGGSQVQLQESGPGLVKPSQTLSLTCTVSGGSISSGGYYWSWIRQH | |
| | | PGKGLEWIGYIYYRGRTYYNPSLKSRVTISVDTSKNQFSLKLSSVTAADTAVYYCARVYSNYG | |
| | | WFDPWGQGTLVTVSSGGGGSGGGGSGGGGSEIVLIQSPGILSLSPGERATLSCRASQSVSSSY | |
| | | LAWYQQKPGQAPRLLIYGASSRATGIPDRFSGSGSGTDFTLTISRLEPEDFAVYYCQQYGSSP | |
| | | TFGPGTKVEIKSGGGGSEVQLVESGGGLVQPGGSLKLSCAASGFTFNKYAMNWVRQAPGKGLE | |
| | | WVARIRSKYNNYATYYADSVKDRFTISRDDSKNTAYLQMNNLKTEDTAVYYCVRHGNFGNSYI | |
| | | SYWAYWGQGTLVTVSSGGGGSGGGGSGGGGSQTVVTQEPSLTVSPGGTVTLTCGSSTGAVTSG | |
| | | NYPNWVQQKPGQAPRGLIGGTKFLAPGTPARFSGSLLGGKAALTLSGVQPEDEAEYYCVLWYS | |
| | | NRWVFGGGTKLTVLGGGGSQRFCTGHFGGLHPCNGHHHHHH | |
| 156. | CH19_0-C4xI2C6-LFcBY | QRFVTGHFGGLYPANGGGGGSQVQLQESGPGLVKPSQTLSLTCTVSGGSISSGGYYWSWIRQH | |
| | | PGKGLEWIGYIYYRGRTYYNPSLKSRVTISVDTSKNQFSLKLSSVTAADTAVYYCARVYSNYG | |
| | | WFDPWGQGTLVTVSSGGGGSGGGGSGGGGSEIVLIQSPGILSLSPGERATLSCRASQSVSSSY | |
| | | LAWYQQKPGQAPRLLIYGASSRATGIPDRFSGSGSGTDFTLTISRLEPEDFAVYYCQQYGSSP | |
| | | TFGGGTKVEIKSGGGGSEVQLVESGGGLVQPGGSLKLSCAASGFTFNKYAMNWVRQAPGKGLE | |
| | | WVARIRSKYNNYATYYADSVKDRFTISRDDSKNTAYLQMNNLKTEDTAVYYCVRHGNFGNSYI | |
| | | SYWAYWGQGTLVTVSSGGGGSGGGGSGGGGSQTVVTQEPSLIVSPGGIVTLICGSSTGAVISG | |
| | | NYPNWVQQKPGQAPRGLIGGIKFLAPGTPARFSGSLLGGKAALTLSGVQPEDEAEYYCVLWYS | |
| | | NRWVFGGGTKLTVLGGGGSQRFCTGHFGGLHPCNGHHHHHH | |
| 157. | CH19_3-F2xI2C6-LFcBY | QRFVTGHFGGLYPANGGGGGSQVQLQESGPGLVKPSQTLSLTCTISGGSISSGGYYWSWIRQH | |
| | | PGKGLEWIGYIFYSGRTYYNPSLKSRVTISVDTSKNQFSLKLTSVTAADTAVYYCARVNSNYG | |
| | | WFDPWGQGTLVTVSSGGGGSGGGGSGGGGSEIVLIQSPGILSLSPGERATLSCRASQSVSSSY | |
| | | LAWYQQKPGQAPRLLIYGASSRATGIPDRFSGSGSGIDFILTISRLEPEDFAVYYCQQYGSSP | |
| | | TFGGGTKVEIKSGGGGSEVQLVESGGGLVQPGGSLKLSCAASGFTFNKYAMNWVRQAPGKGLE | |
| | | WVARIRSKYNNYATYYADSVKDRFTISRDDSKNTAYLQMNNLKTEDTAVYYCVRHGNFGNSYI | |
| | | SYWAYWGQGTLVIVSSGGGGSGGGGSGGGGSQTVVTQEPSLIVSPGGIVTLICGSSTGAVISG | |
| | | NYPNWVQQKPGQAPRGLIGGIKFLAPGTPARFSGSLLGGKAALTLSGVQPEDEAEYYCVLWYS | |
| | | NRWVFGGGTKLTVLGGGGSQRFCTGHFGGLHPCNGHHHHHH | |
| 158. | CH19_3-B10xI2C6-LFcBY | QRFVTGHFGGLYPANGGGGGSQVQLQESGPGLVKPSQTLSLTCTVSGGSISSGGYYWSWIRQH | |
| | | PGKGLDWIGYIFYRGRTYYNPSLKSRVTISVDTSKNQFSLKLSSVTAADTAVYYCARVNSNYG | |
| | | WFDPWGQGTLVTVSSGGGGSGGGGSGGGGSEIVLIQSPGILSLSPGERATLSCRASQSVSSSY | |
| | | LAWYQQKPGQAPRLLIYGASSRATGIPDRFSGSGSGIDFILTISRLEPEDFAVYYCQQYGSSP | |
| | | LTFGGGTKVEIKSGGGGSEVQLVESGGGLVQPGGSLKLSCAASGFTFNKYAMNWVRQAPGKGL | |
| | | EWVARIRSKYNNYATYYADSVKDRFTISRDDSKNTAYLQMNNLKTEDTAVYYCVRHGNFGNSY | |
| | | ISYWAYWGQGTLVTVSSGGGGSGGGGSGGGGSQTVVTQEPSLTVSPGGTVTLTCGSSTGAVTS | |
| | | GNYPNWVQQKPGQAPRGLIGGTKFLAPGTPARFSGSLLGGKAALTLSGVQPEDEAEYYCVLWY | |
| | | SNRWVFGGGTKLTVLGGGGSQRFCTGHFGGLHPCNGHHHHHH | |
| 159. | CH19_0-G4xI2C6-LFcBY | QRFVTGHFGGLYPANGGGGGSQVQLQESGPGLVKPSQTLSLTCTVSGGSISSGGYYWSWIRQH | |
| | | PGKGLEWIGYIYYRGRTYYNPSLKSRVTISVDTSKNQFSLKLSSVTAADTAVYYCARVYSNYG | |
| | | WFDPWGQGTLVTVSSGGGGSGGGGSGGGGSEIVLIQSPGILSLSPGERATLSCRASQSVSSSY | |
| | | LAWYQQKPGQAPRLLIYGASTRATGIPDRFSGSGSGIDFILTISRLEPEDFAVYYCQQYGSSP | |
| | | SFGQGTKVEIKSGGGGSEVQLVESGGGLVQPGGSLKLSCAASGFTFNKYAMNWVRQAPGKGLE | |
| | | WVARIRSKYNNYATYYADSVKDRFTISRDDSKNTAYLQMNNLKTEDTAVYYCVRHGNFGNSYI | |
| | | SYWAYWGQGTLVTVSSGGGGSGGGGSGGGGSQTVVTQEPSLTVSPGGTVTLTCGSSTGAVTSG | |
| | | NYPNWVQQKPGQAPRGLIGGTKFLAPGTPARFSGSLLGGKAALTLSGVQPEDEAEYYCVLWYS | |
| | | NRWVFGGGTKLTVLGGGGSQRFCTGHFGGLHPCNGHHHHHH | |
| 160. | CH19_0-H5xI2C6-LFcBY | QRFVTGHFGGLYPANGGGGGSQVQLQESGPGLVRPSQTLSLTCTVSGGSISSGGYYWSWIRQH | |
| | | PGKGLEWIGYIYYRGRTYYNPSLKSRVTISVDTSKNQFSLKLSSVTAADTAVYYCARVYSNYG | |
| | | WFDPWGQGTLVTVSSGGGGSGGGGSGGGGSEIVLTQSPGTLSLSPGERATLSCRASQSVSSSY | |
| | | LAWYQQKPGQAPRLLIYGASSRATGIPDRFSGSGSGTDFTLTISRLEPEDFAVYYCQQYDTSP | |
| | | LTFGGGTKVEIKSGGGGSEVQLVESGGGLVQPGGSLKLSCAASGFTFNKYAMNWVRQAPGKGL | |
| | | EWVARIRSKYNNYATYYADSVKDRFTISRDDSKNTAYLQMNNLKTEDTAVYYCVRHGNFGNSY | |
| | | ISYWAYWGQGTLVTVSSGGGGSGGGGSGGGGSQTVVTQEPSLTVSPGGTVTLTCGSSTGAVTS | |
| | | GNYPNWVQQKPGQAPRGLIGGTKFLAPGTPARFSGSLLGGKAALTLSGVQPEDEAEYYCVLWY | |
| | | SNRWVFGGGTKLTVLGGGGSQRFCTGHFGGLHPCNGHHHHHH | |
| 161. | CH19_0-B8xI2C6-LFeBY | QRFVTGHFGGLYPANGGGGGSQVQLQESGPGLVKPSQTLSLTCTVSGGSISSGGYYWSWIRQH | |
| | | PGKGLEWIGYIYYRGRTYYNPSLKSRVTISVDTSKNQFSLKLSSVTAADTAVYYCARVYSNYG | |
| | | WFDPWGQGTLVTVSSGGGGSGGGGSGGGGSEIVLIQSPGILSLSPGERATLSCRASQSVSSSY | |
| | | LAWYQQKPGQAPRLLIYGASSRATGIPDRFSGSGSGTDFTLTISRLEPEDFAVYYCQQYGSSP | |
| | | TFGGGTKVEIKSGGGGSEVQLVESGGGLVQPGGSLKLSCAASGFIFNKYAMNWVRQAPGKGLE | |
| | | WVARIRSKYNNYATYYADSVKDRFTISRDDSKNTAYLQMNNLKTEDTAVYYCVRHGNFGNSYI | |
| | | SYWAYWGQGTLVTVSSGGGGSGGGGSGGGGSQTVVTQEPSLTVSPGGTVTLTCGSSTGAVTSG | |
| | | NYPNWVQQKPGQAPRGLIGGIKFLAPGTPARFSGSLLGGKAALTLSGVQPEDEAEYYCVLWYS | |
| | | NRWVFGGGTKLTVLGGGGSQRFCTGHFGGLHPCNGHHHHHH | |
| 162. | CH19_2-D9xI2C6-LFcBY | QRFVTGHFGGLYPANGGGGGSQVQLQESGPGLVKPSQTLSLTCTVSGGSISSGGYYWSWIRQH | |
| | | PGKGLEWIGYIYYRGRTYYNPSLKSRVTISVDTSKNQFSLKLSSVTAADTAVYYCARVYSNYG | |
| | | WFDPWGQGTLVTVSSGGGGSGGGGSGGGGSEIVLTQSPGTLSLSPGERATLSCRASQSVSSSY | |
| | | LAWYQQKPGQAPRLLIYGASSRATGIPDRFSGSGSGTDFTLTISRLEPEDFAVYYCQQYGSSP | |
| | | LTFGGGTKVEIKSGGGGSEVQLVESGGGLVQPGGSLKLSCAASGFTFNKYAMNWVRQAPGKGL | |
| | | EWVARIRSKYNNYATYYADSVKDRFTISRDDSKNTAYLQMNNLKTEDTAVYYCVRHGNFGNSY | |
| | | ISYWAYWGQGTLVTVSSGGGGSGGGGSGGGGSQTVVTQEPSLTVSPGGTVTLTCGSSTGAVTS | |
| | | GNYPNWVQQKPGQAPRGLIGGTKFLAPGTPARFSGSLLGGKAALTLSGVQPEDEAEYYCVLWY | |
| | | SNRWVFGGGTKLTVLGGGGSQRFCTGHFGGLHPCNGHHHHHH | |
| 163. | CH19_8-H7xI2C6-LFcBY | QRFVTGHFGGLYPANGGGGGSQVQLQESGPGLVKPSQTLSLTCTVSGGSISSGGYYWSWVRQH | |
| | | PGKGLEWIGYIFYSGRTYYNPSLKSRVIISVDTSKNQFSLKLSSVTAADTAVYYCARVYSNYG | |
| | | WFDPWGQGTLVTVSSGGGGSGGGGSGGGGSEIVLTQSPGTLSLSPGERATLSCRASQSVSSSY | |
| | | LAWYQQKPGQAPRLLIYGASSRATGIPDRFSGSGSGTDFTLTISRLEPEDFAVYYCQQYGSSP | |
| | | LTFGGGTKVEIKSGGGGSEVQLVESGGGLVQPGGSLKLSCAASGFTFNKYAMNWVRQAPGKGL | |
| | | EWVARIRSKYNNYATYYADSVKDRFTISRDDSKNTAYLQMNNLKTEDTAVYYCVRHGNFGNSY | |
| | | ISYWAYWGQGTLVTVSSGGGGSGGGGSGGGGSQTVVTQEPSLTVSPGGTVTLICGSSTGAVTS | |
| | | GNYPNWVQQKPGQAPRGLIGGTKFLAPGTPARFSGSLLGGKAALTLSGVQPEDEAEYYCVLWY | |
| | | SNRWVFGGGTKLTVLGGGGSQRFCTGHFGGLHPCNGHHHHHH | |
| 164. | CH19_9-C2xI2C6-LFcBY | QRFVTGHFGGLYPANGGGGGSQVQLQESGPGLVKPSQTLSLICTVSGGSISSGGYYWSWIRQH | |
| | | PGKGLEWIGYIFYSGRTYYNPSLKSRVTISVDTSKNQFSLKLSSVTAADTAVYYCARVYSNYG | |
| | | WFDPWGQGTLVTVSSGGGGSGGGGSGGGGSEIVLTQSPGTLSLSPGERATLSCRASQSVSSSY | |
| | | LAWYQQKPGQAPRLLIYGASSRATGIPDRFSGSGSGTDFTLTISRLEPEDFAVYYCQQYGSSP | |
| | | LTFGGGTKVEIKSGGGGSEVQLVESGGGLVQPGGSLKLSCAASGFTFNKYAMNWVRQAPGKGL | |
| | | EWVARIRSKYNNYATYYADSVKDRFTISRDDSKNTAYLQMNNLKTEDTAVYYCVRHGNFGNSY | |
| | | ISYWAYWGQGTLVTVSSGGGGSGGGGSGGGGSQTVVIQEPSLIVSPGGIVTLICGSSTGAVTS | |
| | | GNYPNWVQQKPGQAPRGLIGGTKFLAPGTPARFSGSLLGGKAALTLSGVQPEDEAEYYCVLWY | |
| | | SNRWVFGGGTKLTVLGGGGSQRFCTGHFGGLHPCNGHHHHHH | |
| 165. | CH19_3-D5xI2C6-LFcBY | QRFVTGHFGGLYPANGGGGGSQVQLQESGPGLVKPSQTLSLTCTVSGGSISSGGYYWSWIRQH | |
| | | PGKGLEWIGYIFYSGRTYYNPSLKSRVSISVDTSKNQFSLKLSSVTAADTAVYYCARVYSNYG | |
| | | WFDPWGQGTLVTVSSGGGGSGGGGSGGGGSEIVLTQSPGTLSLSPGERATLSCRASQSVSSSY | |
| | | LAWYQQKPGQAPRLLIYGASSRATGIPDRFSGSGSGTDFTLTISRLEPEDFAVYYCQQYGSSP | |
| | | LTFGGGTKVEIKSGGGGSEVQLVESGGGLVQPGGSLKLSCAASGFTFNKYAMNWVRQAPGKGL | |
| | | EWVARIRSKYNNYATYYADSVKDRFTISRDDSKNTAYLQMNNLKTEDTAVYYCVRHGNFGNSY | |
| | | ISYWAYWGQGTLVTVSSGGGGSGGGGSGGGGSQTVVIQEPSLIVSPGGIVTLICGSSTGAVIS | |
| | | GNYPNWVQQKPGQAPRGLIGGTKFLAPGTPARFSGSLLGGKAALTLSGVQPEDEAEYYCVLWY | |
| | | SNRWVFGGGTKLTVLGGGGSQRFCTGHFGGLHPCNGHHHHHH | |
| 166. | CH19_1-G11xI2C6-LFcBY | QRFVTGHFGGLYPANGGGGGSQVQLQESGPGLVKPSETLSLTCTVSGGSVSSGGYYWSWIRQP | |
| | | PGKGLEWIGYIYYRGRTYYNPSLKSRVTISVDTSKNQFSLKLSSVTAADTAVYYCARVYSNYG | |
| | | WFDPWGQGTLVTVSSGGGGSGGGGSGGGGSEIVLIQSPGILSLSPGERATLSCRASQSVSSSY | |
| | | LAWYQQKPGQAPRLLIYGASSRATGIPDRFSGSGSGTDFTLTISRLEPEDFAVYYCQQYGSSP | |
| | | LTFGGGTKVEIKSGGGGSEVQLVESGGGLVQPGGSLKLSCAASGFTFNKYAMNWVRQAPGKGL | |
| | | EWVARIRSKYNNYATYYADSVKDRFTISRDDSKNTAYLQMNNLKTEDTAVYYCVRHGNFGNSY | |
| | | ISYWAYWGQGTLVTVSSGGGGSGGGGSGGGGSQTVVIQEPSLIVSPGGIVTLICGSSTGAVIS | |
| | | GNYPNWVQQKPGQAPRGLIGGTKFLAPGTPARFSGSLLGGKAALTLSGVQPEDEAEYYCVLWY | |
| | | SNRWVFGGGTKLTVLGGGGSQRFCTGHFGGLHPCNGHHHHHH | |
| 167. | CH19_1-H11xI2C6-LFcBY | QRFVTGHFGGLYPANGGGGGSQVQLQESGPGLVKPSQTLSLTCTVSGGSISSGGYYWSWIRQH | |
| | | PGKGLEWIGYIYYRGRTYYNPSLKSRVTISVDTSKNQFSLKLSSVTAADTAVYYCARVYSNYG | |
| | | WFDPWGQGTLVTVSSGGGGSGGGGSGGGGSEIVLIQSPGILSLSPGERATLSCRASQSVSSSY | |
| | | LAWYQQKPGQAPRLLIYGASSRATGIPDRFSGSGSGTDFTLTISRLEPEDFAVYYCQQYGSSP | |
| | | TFGQGTRLEIKSGGGGSEVQLVESGGGLVQPGGSLKLSCAASGFTFNKYAMNWVRQAPGKGLE | |
| | | WVARIRSKYNNYATYYADSVKDRFTISRDDSKNTAYLQMNNLKTEDTAVYYCVRHGNFGNSYI | |
| | | SYWAYWGQGTLVTVSSGGGGSGGGGSGGGGSQTVVTQEPSLIVSPGGIVTLICGSSTGAVISG | |
| | | NYPNWVQQKPGQAPRGLIGGIKFLAPGTPARFSGSLLGGKAALTLSGVQPEDEAEYYCVLWYS | |
| | | NRWVFGGGTKLTVLGGGGSQRFCTGHFGGLHPCNGHHHHHH | |
| 168. | CH19_9-F3xI2C6-LFcBY | QRFVTGHFGGLYPANGGGGGSQVQLQESGPGLVKPSQTLSLTCTVSGGSISSGGYYWSWIRQH | |
| | | PGKGLEWIGYIFYSGKTYYNPSLKSRVSISVDTSKNQFSLKLSSVTAADTAVYYCARVYSNYG | |
| | | WFDPWGQGTLVTVSSGGGGSGGGGSGGGGSEIVLIQSPGILSLSPGERATLSCRASQSVSSSY | |
| | | LAWYQQKPGQAPRLLIYGASSRATGIPDRFSGSGSGIDFILTISRLEPEDFAVYYCQQYGSSP | |
| | | ITFGQGTRLEIKSGGGGSEVQLVESGGGLVQPGGSLKLSCAASGFTFNKYAMNWVRQAPGKGL | |
| | | EWVARIRSKYNNYATYYADSVKDRFTISRDDSKNTAYLQMNNLKTEDTAVYYCVRHGNFGNSY | |
| | | ISYWAYWGQGTLVTVSSGGGGSGGGGSGGGGSQTVVTQEPSLTVSPGGTVTLTCGSSTGAVTS | |
| | | GNYPNWVQQKPGQAPRGLIGGTKFLAPGIPARFSGSLLGGKAALTLSGVQPEDEAEYYCVLWY | |
| | | SNRWVFGGGTKLIVLGGGGSQRFCIGHFGGLHPCNGHHHHHH | |
| 169. | CH19_2-G6xI2C6-LFcBY | QRFVTGHFGGLYPANGGGGGSQVQLQESGPGLVKPSETLSLTCTVSGGSISSYYWSWIRQPPG | |
| | | KGLEWIGYIYYSGSTNYNPSLKSRVTMSIDTSKNQFSLKLISVTAADTAVYYCARDQRRIVAA | |
| | | GGYYYGMDVWGQGTIVIVSSGGGGSGGGGSGGGGSEIVLIQSPGILSLSPGERATLSCRASQS | |
| | | VSSSYLAWYQQKPGQAPRLLIYGASTRATGIPARFSGSGSGTDFILTISRLEPEDFAVYYCQQ | |
| | | YGSSPFTFGPGTKVDIKSGGGGSEVQLVESGGGLVQPGGSLKLSCAASGFTFNKYAMNWVRQA | |
| | | PGKGLEWVARIRSKYNNYATYYADSVKDRFTISRDDSKNTAYLQMNNLKTEDTAVYYCVRHGN | |
| | | FGNSYISYWAYWGQGTLVTVSSGGGGSGGGGSGGGGSQTVVTQEPSLTVSPGGTVTLTCGSST | |
| | | GAVTSGNYPNWVQQKPGQAPRGLIGGTKFLAPGTPARFSGSLLGGKAALTLSGVQPEDEAEYY | |
| | | CVLWYSNRWVFGGGTKLTVLGGGGSQRFCTGHFGGLHPCNGHHHHHH | |
| 170. | CH19_2-H7xI2C6-LFcBY | QRFVTGHFGGLYPANGGGGGSQVQLQESGPGLVKPSQTLSLTCTVSGGSISSNDYYWSWIRQH | |
| | | PGKGLEWIGYIYYSGSTFYNPSLKSRGAISVDTSKNQFSLKLTSVTAADTAVYYCARGVYRIG | |
| | | AFDIWGQGTMVTVSSGGGGSGGGGSGGGGSDIQMTQSPSSLSASVGDRVTITCRASQSISSYL | |
| | | NWYQQKPGKAPKSLIYAASSLQSGVPSKFSGSGSGTDFILTISSLQPEDIATYYCQQSYSTPQ | |
| | | AFGGGTKVDIKSGGGGSEVQLVESGGGLVQPGGSLKLSCAASGFTFNKYAMNWVRQAPGKGLE | |
| | | WVARIRSKYNNYATYYADSVKDRFTISRDDSKNTAYLQMNNLKTEDTAVYYCVRHGNFGNSYI | |
| | | SYWAYWGQGTLVTVSSGGGGSGGGGSGGGGSQTVVTQEPSLTVSPGGTVTLTCGSSTGAVTSG | |
| | | NYPNWVQQKPGQAPRGLIGGIKFLAPGTPARFSGSLLGGKAALTLSGVQPEDEAEYYCVLWYS | |
| | | NRWVFGGGTKLTVLGGGGSQRFCTGHFGGLHPCNGHHHHHH | |
| 171. | CH19_5-B3xI2C6-LFcBY | QRFVTGHFGGLYPANGGGGGSQVQLVQSGAEVKKPGASVKVSCKASGYTFTYYGISWVRQAPG | |
| | | QGLEWMGWINPYGGETNYAQKLQGRVTMTTDTSTSTAYMELRSLRSDDTAVYYCARGSGGFDY | |
| | | WGQGTLVTVSSGGGGSGGGGSGGGGSDIVMTQTPLSLSVTPGEPASISCRSSQSLLHSNGYNY | |
| | | LDWYLQKPGQSPQLLIYLGSYRASGVPDRFSGSGSGTDFTLKISRVEAEDVGVYYCMQALQTP | |
| | | FTFGPGTKVDIKSGGGGSEVQLVESGGGLVQPGGSLKLSCAASGFTFNKYAMNWVRQAPGKGL | |
| | | EWVARIRSKYNNYATYYADSVKDRFTISRDDSKNTAYLQMNNLKTEDTAVYYCVRHGNFGNSY | |
| | | ISYWAYWGQGTLVTVSSGGGGSGGGGSGGGGSQTVVTQEPSLTVSPGGTVTLTCGSSTGAVTS | |
| | | GNYPNWVQQKPGQAPRGLIGGTKFLAPGTPARFSGSLLGGKAALTLSGVQPEDEAEYYCVLWY | |
| | | SNRWVFGGGTKLIVLGGGGSQRFCIGHFGGLHPCNGHHHHHH | |
| 172. | CH19_5-E10xI2C6-LFcBY | QRFVTGHFGGLYPANGGGGGSQVQLVQSGAEVKKPGASVKVSCKASGYTFTYYGISWVRQAPG | |
| | | QGLEWMGWINPYSGATNYAQKLQGRVTMTTDTSTSTAYMELRSLRSDDTAVYYCARGSGGFDY | |
| | | WGQGTLVTVSSGGGGSGGGGSGGGGSDIVMTQTPLSLSVTPGEPASISCRSSQSLLHSNGYNY | |
| | | LDWYLQKPGQSPQLLIYLGSYRASGVPDRFSGSGSGTDFTLKISRVEAEDVGVYYCMQALQTP | |
| | | FTFGPGTKVDIKSGGGGSEVQLVESGGGLVQPGGSLKLSCAASGFTFNKYAMNWVRQAPGKGL | |
| | | EWVARIRSKYNNYATYYADSVKDRFTISRDDSKNTAYLQMNNLKTEDTAVYYCVRHGNFGNSY | |
| | | ISYWAYWGQGTLVTVSSGGGGSGGGGSGGGGSQTVVTQEPSLTVSPGGTVTLTCGSSTGAVTS | |
| | | GNYPNWVQQKPGQAPRGLIGGTKFLAPGTPARFSGSLLGGKAALTLSGVQPEDEAEYYCVLWY | |
| | | SNRWVFGGGTKLTVLGGGGSQRFCTGHFGGLHPCNGHHHHHH | |
| 173. | CH19_6-G10xI2C6-LFcBY | QRFVTGHFGGLYPANGGGGGSQVQLVQSGAEVKKPGASVKVSCKASGYTFTYYGISWVRQAPG | |
| | | QGLEWMGWINPYTGKTNYAQKLQGRVTMTTDTSTSTAYMELRSLRSDDTAVYYCARGSGGFDY | |
| | | WGQGTLVTVSSGGGGSGGGGSGGGGSDIVMTQTPLSLSVTPGEPASISCRSSQSLLHSNGYNY | |
| | | LDWYLQKPGQSPQLLIYLGSYRASGVPDRFSGSGSGTDFTLKISRVEAEDVGVYYCMQALQTP | |
| | | FTFGPGTKVDIKSGGGGSEVQLVESGGGLVQPGGSLKLSCAASGFTFNKYAMNWVRQAPGKGL | |
| | | EWVARIRSKYNNYATYYADSVKDRFTISRDDSKNTAYLQMNNLKTEDTAVYYCVRHGNFGNSY | |
| | | ISYWAYWGQGTLVTVSSGGGGSGGGGSGGGGSQTVVTQEPSLTVSPGGTVTLTCGSSTGAVTS | |
| | | GNYPNWVQQKPGQAPRGLIGGTKFLAPGIPARFSGSLLGGKAALTLSGVQPEDEAEYYCVLWY | |
| | | SNRWVFGGGTKLTVLGGGGSQRFCTGHFGGLHPCNGHHHHHH | |
| 174. | CH19_4-H8xI2C6-LFcBY | QRFVTGHFGGLYPANGGGGGSQVQLVQSGAEVKKPGASVKVSCKASGYTFTYYGISWVRQAPG | |
| | | QGLEWMGWINPYTGKTNYAQKLQGRVTMTTDTSTSTAYMELRSLRSDDTAVYYCARGSGGFDY | |
| | | WGQGTLVTVSSGGGGSGGGGSGGGGSDIVMTQTPLSLSVTPGEPASISCRSSQSLLHSVGYNY | |
| | | LDWYLQKPGQSPQLLTYLGSYRASGVPDRFSGSGSGTDFTLKISRVEAEDVGVYYCMQALQTP | |
| | | FTFGPGTKVDIKSGGGGSEVQLVESGGGLVQPGGSLKLSCAASGFTFNKYAMNWVRQAPGKGL | |
| | | EWVARIRSKYNNYATYYADSVKDRFTISRDDSKNTAYLQMNNLKTEDTAVYYCVRHGNFGNSY | |
| | | ISYWAYWGQGTLVTVSSGGGGSGGGGSGGGGSQTVVTQEPSLTVSPGGTVTLICGSSTGAVIS | |
| | | GNYPNWVQQKPGQAPRGLIGGTKFLAPGTPARFSGSLLGGKAALTLSGVQPEDEAEYYCVLWY | |
| | | SNRWVFGGGTKLTVLGGGGSQRFCTGHFGGLHPCNGHHHHHH | |
| 175. | CH19_2-E4xI2C6-LFcBY | QRFVTGHFGGLYPANGGGGGSQVQLVQSGAEVKKPGASVKVSCKASGYTFTSYGISWVRQAPG | |
| | | QGLEWMGWINPYIGNRNYAQKVQDRVIMITDTSTNTAYMELSSLRSDDTAVYYCARGSGGFDY | |
| | | WGQGTLVTVSSGGGGSGGGGSGGGGSDIVMTQSPLSLPVTLGQPASISCRSSQSLLHSVGYNY | |
| | | LDWYLQKPGQSPQLLIYLGSNRASGVPDRFSGSGSGTDFTLKISRVEAEDVGVYYCMQALQTP | |
| | | FTFGPGTKLEIKSGGGGSEVQLVESGGGLVQPGGSLKLSCAASGFTFNKYAMNWVRQAPGKGL | |
| | | EWVARIRSKYNNYATYYADSVKDRFTISRDDSKNTAYLQMNNLKTEDTAVYYCVRHGNFGNSY | |
| | | ISYWAYWGQGTLVTVSSGGGGSGGGGSGGGGSQTVVIQEPSLIVSPGGIVTLICGSSTGAVIS | |
| | | GNYPNWVQQKPGQAPRGLIGGTKFLAPGTPARFSGSLLGGKAALTLSGVQPEDEAEYYCVLWY | |
| | | SNRWVFGGGTKLTVLGGGGSQRFCTGHFGGLHPCNGHHHHHH | |
| 176. | CH19_6-B8xI2C6-LFcBY | QRFVTGHFGGLYPANGGGGGSQVQLVQSGAEVKKPGASVKVSCKASGYTFTYYGISWVRQAPG | |
| | | QGLEWMGWINPYIGKTNYAQKLQDRVIMITDTSTNTAYMELRSLRSDDTAVYYCARGSGGFDY | |
| | | WGQGTLVTVSSGGGGSGGGGSGGGGSDIVMTQTPLSLPVTPGEPASISCRSSQSLLHSVGYNY | |
| | | LDWYLQKPGQSPQLLIYLGSNRASGVPDRFSGSGSGTDFTLKISRVEAEDVGVYYCMQALQTP | |
| | | FTFGPGTKVDIKSGGGGSEVQLVESGGGLVQPGGSLKLSCAASGFTFNKYAMNWVRQAPGKGL | |
| | | EWVARIRSKYNNYATYYADSVKDRFTISRDDSKNTAYLQMNNLKTEDTAVYYCVRHGNFGNSY | |
| | | ISYWAYWGQGTLVTVSSGGGGSGGGGSGGGGSQTVVIQEPSLIVSPGGIVTLICGSSIGAVIS | |
| | | GNYPNWVQQKPGQAPRGLIGGTKFLAPGTPARFSGSLLGGKAALTLSGVQPEDEAEYYCVLWY | |
| | | SNRWVFGGGTKLTVLGGGGSQRFCTGHFGGLHPCNGHHHHHH | |
| 177. | CH19_0-B4xI2C6-LFcBY | QRFVTGHFGGLYPANGGGGGSQVQLVQSGAEVKKPGASVKVSCKASGYTFTTYGISWVRQAPG | |
| | | QGLEWMGWINPYTGKTNYAQKLQGRVTMATDTSTSTAYMELRSLRSDDTAVYYCARGSGGFDY | |
| | | WGQGTLVTVSSGGGGSGGGGSGGGGSDIVMTQSPLSLPVTPGEPASISCRSSQSLLHSVGYNY | |
| | | LDWYLQKPGQSPQLLIYLGSNRASGVPDRFSGSGSGTDFTLKISRVEAEDVGVYYCMQALQTP | |
| | | FTFGPGTKLEIKSGGGGSEVQLVESGGGLVQPGGSLKLSCAASGFTFNKYAMNWVRQAPGKGL | |
| | | EWVARIRSKYNNYATYYADSVKDRFTISRDDSKNTAYLQMNNLKTEDTAVYYCVRHGNFGNSY | |
| | | ISYWAYWGQGTLVTVSSGGGGSGGGGSGGGGSQTVVIQEPSLIVSPGGIVTLICGSSIGAVIS | |
| | | GNYPNWVQQKPGQAPRGLIGGTKFLAPGTPARFSGSLLGGKAALTLSGVQPEDEAEYYCVLWY | |
| | | SNRWVFGGGTKLTVLGGGGSQRFCTGHFGGLHPCNGHHHHHH | |
| 178. | CH19_9-F1xI2C6-LFcBY | QRFVTGHFGGLYPANGGGGGSQVQLVQSGAEVKEPGASVKVSCKASGYTFTYYGISWVRQAPG | |
| | | QGLEWMGWINPYIGNRNYAQKVQDRVIMITDTSINTAYMELRSLRSDDTAVYYCARGSGGFDY | |
| | | WGQGTLVTVSSGGGGSGGGGSGGGGSDIVMTQSPLSLPVTPGEPASISCRSSQSLLHSVGYNY | |
| | | LDWYLQKPGQSPQLLIYLGSNRASGVPDRFSGSGSGTDFTLKISRVEAEDVGVYYCMQALQTP | |
| | | FTFGPGTKLEIKSGGGGSEVQLVESGGGLVQPGGSLKLSCAASGFTFNKYAMNWVRQAPGKGL | |
| | | EWVARIRSKYNNYATYYADSVKDRFTISRDDSKNTAYLQMNNLKTEDTAVYYCVRHGNFGNSY | |
| | | ISYWAYWGQGTLVTVSSGGGGSGGGGSGGGGSQTVVTQEPSLTVSPGGTVTLTCGSSTGAVTS | |
| | | GNYPNWVQQKPGQAPRGLIGGTKFLAPGTPARFSGSLLGGKAALTLSGVQPEDEAEYYCVLWY | |
| | | SNRWVFGGGTKLTVLGGGGSQRFCTGHFGGLHPCNGHHHHHH | |
| 179. | CH19_4-A7xI2C6-LFcBY | QRFVTGHFGGLYPANGGGGGSQVQLVQSGAEVKKPGASVKVSCKASGYTFTYYGISWVRQAPG | |
| | | QGLEWMGWINPYTGKTNYAQKLQGRVTMTTDTSTSTAYMELRSLRSDDTAVYYCARGSGGFDY | |
| | | WGQGTLVTVSSGGGGSGGGGSGGGGSDIVMTQSPLSLPVTPGEPASISCRSSQSLLHSVGYNY | |
| | | LDWYLQKPGQSPQLLIYLGSNRASGVPDRFSGSGSGIDFTLKISRVEAEDVGVYYCMQALQIP | |
| | | FTFGPGTKVEIKSGGGGSEVQLVESGGGLVQPGGSLKLSCAASGFTFNKYAMNWVRQAPGKGL | |
| | | EWVARIRSKYNNYATYYADSVKDRFTISRDDSKNTAYLQMNNLKTEDTAVYYCVRHGNFGNSY | |
| | | ISYWAYWGQGTLVTVSSGGGGSGGGGSGGGGSQTVVTQEPSLTVSPGGTVTLTCGSSTGAVTS | |
| | | GNYPNWVQQKPGQAPRGLIGGTKFLAPGTPARFSGSLLGGKAALTLSGVQPEDEAEYYCVLWY | |
| | | SNRWVFGGGTKLTVLGGGGSQRFCTGHFGGLHPCNGHHHHHH | |
| 180. | CH19_6-E12xI2C6-LFcBY | QRFVTGHFGGLYPANGGGGGSQVQLVQSGAEVKKPGASVKVSCKASGYTFTSYGITWVRQAPG | |
| | | QGLEWMGWINPYIGNRNYAQKVQGRVIMITDTSTSTAYMELRSLRSDDTAVYYCARGSGGFDY | |
| | | WGQGTLVTVSSGGGGSGGGGSGGGGSDIVMTQSPLSLSVTPGEPASISCRSSQSLLHSVGYNY | |
| | | LDWYLQKPGQSPQLLIYLGSNRASGVPDRFSGSGSGIDFTLKISRVEAEDVGVYYCMQALQTP | |
| | | FTFGPGTKVDIKSGGGGSEVQLVESGGGLVQPGGSLKLSCAASGFTFNKYAMNWVRQAPGKGL | |
| | | EWVARIRSKYNNYATYYADSVKDRFTISRDDSKNTAYLQMNNLKTEDTAVYYCVRHGNFGNSY | |
| | | ISYWAYWGQGTLVTVSSGGGGSGGGGSGGGGSQTVVTQEPSLTVSPGGTVTLTCGSSTGAVTS | |
| | | GNYPNWVQQKPGQAPRGLIGGTKFLAPGTPARFSGSLLGGKAALTLSGVQPEDEAEYYCVLWY | |
| | | SNRWVFGGGTKLTVLGGGGSQRFCTGHFGGLHPCNGHHHHHH | |
| 181. | CH19_6-C12xI2C6-LFcBY | QRFVTGHFGGLYPANGGGGGSQVQLVQSGAEVKKPGASVKVSCKASGYTFTSYGISWVRQAPG | |
| | | QGLEWMGWINPYIGNRNYAQKFQGRVIMITDTSTNTAYMELSSLRSEDTAVYYCARGSGGFDY | |
| | | WGQGTLVTVSSGGGGSGGGGSGGGGSDIVMTQSPLSLPVTPGEPASISCRSSQSLLHSVGYNY | |
| | | LDWYLQKPGQSPQLLIYLGSNRASGVPDRFSGSGSGIDFTLKISRVEAEDVGVYYCMQALQTP | |
| | | FTFGPGTKVDIKSGGGGSEVQLVESGGGLVQPGGSLKLSCAASGFTFNKYAMNWVRQAPGKGL | |
| | | EWVARIRSKYNNYATYYADSVKDRFTISRDDSKNTAYLQMNNLKTEDTAVYYCVRHGNFGNSY | |
| | | ISYWAYWGQGTLVTVSSGGGGSGGGGSGGGGSQTVVTQEPSLTVSPGGTVTLTCGSSTGAVTS | |
| | | GNYPNWVQQKPGQAPRGLIGGTKFLAPGTPARFSGSLLGGKAALTLSGVQPEDEAEYYCVLWY | |
| | | SNRWVFGGGTKLTVLGGGGSQRFCTGHFGGLHPCNGHHHHHH | |
| 182. | CH19_6-A7xI2C6-LFcBY | QRFVTGHFGGLYPANGGGGGSQVQLVQSGAEVKKPGASVKVSCKASGYSFTSYGISWVRQAPG | |
| | | QGLEWMGWINPYTGNRNYAQKVQGRVTMTTDTSTSTAYMELRSLRSDDTAVYYCARGSGGFDY | |
| | | WGQGTLVTVSSGGGGSGGGGSGGGGSDIVMTQSPLSLPVTPGEPASISCRSSQSLLHSVGYNY | |
| | | LDWYLQKPGQSPQLLIYLGSNRASGVPDRFSGSGSGTDFTLKISRVEAEDVGVYYCMQALQTP | |
| | | FTFGPGTKVEIKSGGGGSEVQLVESGGGLVQPGGSLKLSCAASGFTFNKYAMNWVRQAPGKGL | |
| | | EWVARIRSKYNNYATYYADSVKDRFTISRDDSKNTAYLQMNNLKTEDTAVYYCVRHGNFGNSY | |
| | | ISYWAYWGQGTLVTVSSGGGGSGGGGSGGGGSQTVVTQEPSLTVSPGGTVTLTCGSSTGAVTS | |
| | | GNYPNWVQQKPGQAPRGLIGGTKFLAPGTPARFSGSLLGGKAALTLSGVQPEDEAEYYCVLWY | |
| | | SNRWVFGGGTKLTVLGGGGSQRFCTGHFGGLHPCNGHHHHHH | |
| 183. | CH19_6-G8xI2C6-LFcBY | QRFVTGHFGGLYPANGGGGGSQVQLVQSGAEVKKPGASVKVSCKASGYTFTYYGISWVRQAPG | |
| | | QGLEWMGWINPYTGKTNYAQKVQGRVTMTTDTSTSTAYMELRNLRSDDTAVYYCARGSGGFDY | |
| | | WGQGTLVTVSSGGGGSGGGGSGGGGSDIVMTQTPLSLSVTPGQPASISCRSSQSLLHSVGYNY | |
| | | LDWYLQKPGQSPQLLIYLGSNRASGVPDRFSGSGSGIDFTLKISRVEAEDVGVYYCMQALQTP | |
| | | FTFGPGTKVDIKSGGGGSEVQLVESGGGLVQPGGSLKLSCAASGFTFNKYAMNWVRQAPGKGL | |
| | | EWVARIRSKYNNYATYYADSVKDRFTISRDDSKNTAYLQMNNLKTEDTAVYYCVRHGNFGNSY | |
| | | ISYWAYWGQGTLVTVSSGGGGSGGGGSGGGGSQTVVTQEPSLTVSPGGTVTLTCGSSTGAVTS | |
| | | GNYPNWVQQKPGQAPRGLIGGTKFLAPGIPARFSGSLLGGKAALTLSGVQPEDEAEYYCVLWY | |
| | | SNRWVFGGGTKLIVLGGGGSQRFCIGHFGGLHPCNGHHHHHH | |
| 184. | CH19_6-F9xI2C6-LFcBY | QRFVTGHFGGLYPANGGGGGSQVQLVQSGAEVKKPGASVKVSCKASGYTFTYYGISWVRQAPG | |
| | | QGLEWMGWINPYTGKTNYAQKLQGRVTMTTDTSTSTAYMELRSLRSDDTAVYYCARGSGGFDY | |
| | | WGQGTLVTVSSGGGGSGGGGSGGGGSDIVMTQTPLSLSVTPGQPASISCRSSQSLLHSVGYNY | |
| | | LDWYLQKPGQSPQLLIYLGSNRASGVPDRFSGSGSGTDFTLKISRVEAEDVGVYYCMQALQTP | |
| | | FTFGPGTKVDIKSGGGGSEVQLVESGGGLVQPGGSLKLSCAASGFTFNKYAMNWVRQAPGKGL | |
| | | EWVARIRSKYNNYATYYADSVKDRFTISRDDSKNTAYLQMNNLKTEDTAVYYCVRHGNFGNSY | |
| | | ISYWAYWGQGTLVTVSSGGGGSGGGGSGGGGSQTVVTQEPSLTVSPGGTVTLTCGSSTGAVTS | |
| | | GNYPNWVQQKPGQAPRGLIGGTKFLAPGTPARFSGSLLGGKAALTLSGVQPEDEAEYYCVLWY | |
| | | SNRWVFGGGTKLTVLGGGGSQRFCTGHFGGLHPCNGHHHHHH | |
| 185. | CH19_0-C11xI2C6-LFcBY | QRFVTGHFGGLYPANGGGGGSQVQLVESGGGVVQPGRSLRLSCAASGFTFRNYAMHWVRQAPG | |
| | | KGLEWVAVISYSGNNKYYASSVKGRFTISRDNSKNTLYLQLNSLRAEDTAVYYCAREFYYDST | |
| | | GYDYSTPGDYWGQGTLVTVSSGGGGSGGGGSGGGGSDIQMTQSPSSLSASVGDRVTITCQASQ | |
| | | DISNYLNWYQQKPGKAPKLLIYDASNLETGVPSRFSGSGSGTDFTFTISSLQPEDIATYYCQQ | |
| | | YDNLPTFGQGTRLEIKSGGGGSEVQLVESGGGLVQPGGSLKLSCAASGFTFNKYAMNWVRQAP | |
| | | GKGLEWVARIRSKYNNYATYYADSVKDRFTISRDDSKNTAYLQMNNLKTEDTAVYYCVRHGNF | |
| | | GNSYISYWAYWGQGTLVTVSSGGGGSGGGGSGGGGSQTVVTQEPSLTVSPGGTVTLTCGSSTG | |
| | | AVISGNYPNWVQQKPGQAPRGLIGGTKFLAPGTPARFSGSLLGGKAALTLSGVQPEDEAEYYC | |
| | | VLWYSNRWVFGGGTKLTVLGGGGSQRFCTGHFGGLHPCNGHHHHHH | |
| 186. | CH19_8-F6xI2C6-LFcBY | QRFVTGHFGGLYPANGGGGGSQVQLVESGGGVVQPGRSLRLSCVASGFTFRNYAMHWVRQAPG | |
| | | KGLEWVAVISYSGNNKYYASSVKGRFTISRDNSKNTLYLQLNSLRAEDTAVYYCAREFYYDST | |
| | | GYDYSTPGDYWGQGTLVTVSSGGGGSGGGGSGGGGSDIQMTQSPSSLSASVGDRVTITCRASQ | |
| | | SISSYLNWYQQKPGKAPKLLIYDASSLQSGVPSRFSGSGSGTEFTLTISSLQAEDVAVYYCQQ | |
| | | YYSTPLIFGGGTKVDIKSGGGGSEVQLVESGGGLVQPGGSLKLSCAASGFTFNKYAMNWVRQA | |
| | | PGKGLEWVARIRSKYNNYATYYADSVKDRFTISRDDSKNTAYLQMNNLKTEDTAVYYCVRHGN | |
| | | FGNSYISYWAYWGQGTLVTVSSGGGGSGGGGSGGGGSQTVVTQEPSLIVSPGGIVTLICGSST | |
| | | GAVTSGNYPNWVQQKPGQAPRGLIGGTKFLAPGTPARFSGSLLGGKAALTLSGVQPEDEAEYY | |
| | | CVLWYSNRWVFGGGTKLTVLGGGGSQRFCTGHFGGLHPCNGHHHHHH | |
| 187. | CH19_0-G9xI2C6-LFcBY | QRFVTGHFGGLYPANGGGGGSQVQLVESGGGVVQPGRSLRLSCAASGFTFRNYAMHWVRQAPG | |
| | | KGLEWVAGISYSGTNKYYASSVKGRFTISRDNSKNTLYLQLNSLRAEDTAVYYCAREFYYDST | |
| | | GYDYSTPGDYWGQGTLVTVSSGGGGSGGGGSGGGGSDIQMTQSPSSLSASVGDRVTITCQASQ | |
| | | DISNYLNWYQQKPGKAPKLLIYDASNLETGVPSRFSGSGSGTEFTLTISSLQPEDIATYYCQQ | |
| | | YDNLPLTFGGGTKVDIKSGGGGSEVQLVESGGGLVQPGGSLKLSCAASGFTFNKYAMNWVRQA | |
| | | PGKGLEWVARIRSKYNNYATYYADSVKDRFTISRDDSKNTAYLQMNNLKTEDTAVYYCVRHGN | |
| | | FGNSYISYWAYWGQGTLVIVSSGGGGSGGGGSGGGGSQTVVIQEPSLIVSPGGIVTLICGSST | |
| | | GAVTSGNYPNWVQQKPGQAPRGLIGGTKFLAPGTPARFSGSLLGGKAALTLSGVQPEDEAEYY | |
| | | CVLWYSNRWVFGGGTKLTVLGGGGSQRFCTGHFGGLHPCNGHHHHHH | |
| 188. | CH19_1-E11xI2C6-LFcBY | QRFVTGHFGGLYPANGGGGGSQVQLVESGGGVVQPGRSLRLSCVASGFTFRNYAMHWVRQAPG | |
| | | KGLEWVAVISYSGNNKYYASSVKGRFTISRDNSKNTLFLQLNSLRAEDTAVYYCAREFYYDST | |
| | | GYDYSTPGNYWGQGTLVIVSSGGGGSGGGGSGGGGSDIQMIQSPSSLSASVGDRVTITCQASQ | |
| | | DISNYLNWYQQKPGKAPKLLIYDASNLETGVPSRFSGSGSGTDFTFTISSLQPEDIATYYCQQ | |
| | | YVNLPLTFGGGTKLEIKSGGGGSEVQLVESGGGLVQPGGSLKLSCAASGFTFNKYAMNWVRQA | |
| | | PGKGLEWVARIRSKYNNYATYYADSVKDRFTISRDDSKNTAYLQMNNLKTEDTAVYYCVRHGN | |
| | | FGNSYISYWAYWGQGTLVIVSSGGGGSGGGGSGGGGSQTVVIQEPSLIVSPGGIVTLICGSST | |
| | | GAVTSGNYPNWVQQKPGQAPRGLIGGTKFLAPGTPARFSGSLLGGKAALTLSGVQPEDEAEYY | |
| | | CVLWYSNRWVFGGGTKLTVLGGGGSQRFCTGHFGGLHPCNGHHHHHH | |
| 189. | CH19_0-F5xI2C6-LFcBY | QRFVTGHFGGLYPANGGGGGSQVQLVESGGGVVQPGRSLRLSCAASGFTFSSYGMQWVRQAPG | |
| | | KGLEWVAVIWYSGSNKYYASSVKGRFTISRDNSKNTLYLQMNSLRAEDTAVYYCARDGYPIFY | |
| | | RYYGMDVWGQGTTVTVSSGGGGSGGGGSGGGGSDIQMTQSPSSLSASVGDRVTITCRASQGIS | |
| | | NYLAWYQQKPGKVPKLLIYAASTLQSGVPSRFSGSGSGTDFTLTISSLQPEDVATYYCQKYNS | |
| | | APLTFGGGTKVEIKSGGGGSEVQLVESGGGLVQPGGSLKLSCAASGFTFNKYAMNWVRQAPGK | |
| | | GLEWVARIRSKYNNYATYYADSVKDRFTISRDDSKNTAYLQMNNLKTEDTAVYYCVRHGNFGN | |
| | | SYISYWAYWGQGTLVTVSSGGGGSGGGGSGGGGSQTVVTQEPSLTVSPGGTVTLTCGSSTGAV | |
| | | TSGNYPNWVQQKPGQAPRGLIGGTKFLAPGTPARFSGSLLGGKAALTLSGVQPEDEAEYYCVL | |
| | | WYSNRWVFGGGTKLTVLGGGGSQRFCTGHFGGLHPCNGHHHHHH | |
| 190. | CH19_1-E1xI2C6-LFcBY | QRFVTGHFGGLYPANGGGGGSQVQLVESGGGVVQPGRSLRLSCAASGFTFSSYGMHWVRQAPG | |
| | | KGLEWVAVISYSGSNKYYASSVKGRFTISRDNSKNTLYLQMNSLRAEDTAVYYCARDGYPIFY | |
| | | RYYGMDVWGQGTTVTVSSGGGGSGGGGSGGGGSEIVLTQSPGTLSLSPGERATLSCRASQSVS | |
| | | SSYLAWYQQKPGQAPRLLIYGASSRATGIPDRFSGSGSGTDFTLTISRLEPEDLAVYYCQQYG | |
| | | TSPLTFGGGTKLEIKSGGGGSEVQLVESGGGLVQPGGSLKLSCAASGFTFNKYAMNWVRQAPG | |
| | | KGLEWVARIRSKYNNYATYYADSVKDRFTISRDDSKNTAYLQMNNLKTEDTAVYYCVRHGNFG | |
| | | NSYISYWAYWGQGTLVTVSSGGGGSGGGGSGGGGSQTVVTQEPSLTVSPGGTVTLTCGSSTGA | |
| | | VTSGNYPNWVQQKPGQAPRGLIGGTKFLAPGIPARFSGSLLGGKAALILSGVQPEDEAEYYCV | |
| | | LWYSNRWVEGGGIKLIVLGGGGSQRFCTGHFGGLHPCNGHHHHHH | |
| 191. | CH19_1-E6xI2C6-LFcBY | QRFVTGHFGGLYPANGGGGGSQVQLVESGGGVVQPGRSLRLSCAASGFTFSSFGMHWVRQAPG | |
| | | KGLEWVAFIWYSGSNKYYASSVKGRVTISRDNSKNTLYLQMNSLRAEDTAVYYCARDGYPIFY | |
| | | YYYGMDVWGQGTIVIVSSGGGGSGGGGSGGGGSEIVLIQSPGILSLSPGERAILSCRASQSVS | |
| | | SSYLAWYQQKPGQAPRLLIYGASSRATGIPDRFSGSGSGTDFTLTISRLEPEDFAVYYCQQYG | |
| | | SSPFTFGPGTRLEIKSGGGGSEVQLVESGGGLVQPGGSLKLSCAASGFTFNKYAMNWVRQAPG | |
| | | KGLEWVARIRSKYNNYATYYADSVKDRFTISRDDSKNTAYLQMNNLKTEDTAVYYCVRHGNFG | |
| | | NSYISYWAYWGQGTLVTVSSGGGGSGGGGSGGGGSQTVVTQEPSLTVSPGGTVTLTCGSSTGA | |
| | | VTSGNYPNWVQQKPGQAPRGLIGGTKFLAPGTPARFSGSLLGGKAALTLSGVQPEDEAEYYCV | |
| | | LWYSNRWVFGGGTKLTVLGGGGSQRFCTGHFGGLHPCNGHHHHHH | |
| 192. | CH19_2G6_302_VKGxI2C6- | QRFVTGHFGGLYPANGGGGGSQVQLVESGGGVVQPGGSLRLSCAASGFTFSSYGMHWVRQAPG | |
| | LFcBY-156 | KGLEWVAFIWYDGSNKYYADSVKGRFTISRDNSKNTLYLQMNSLRAEDTAVYYCARRAGIIGT | |
| | | IGYYYGMDVWGQGTTVTVSSGGGGSGGGGSGGGGSSYELTQPPSVSVSPGQTASITCSGDRLG | |
| | | EKYTSWYQQRPGQSPLLVIYQDTKRPSGIPERFSGSNSGNTATLTISGTQAMDEADYYCQAWE | |
| | | SSTVVFGGGTKLIVLSGGGGSEVQLVESGGGLVQPGGSLKLSCAASGFTENKYAMNWVRQAPG | |
| | | KGLEWVARIRSKYNNYATYYADSVKDRFTISRDDSKNTAYLQMNNLKTEDTAVYYCVRHGNFG | |
| | | NSYISYWAYWGQGTLVTVSSGGGGSGGGGSGGGGSQTVVTQEPSLTVSPGGTVTLTCGSSTGA | |
| | | VTSGNYPNWVQQKPGQAPRGLIGGTKFLAPGTPARFSGSLLGGKAALTLSGVQPEDEAEYYCV | |
| | | LWYSNRWVFGGGTKLTVLGGGGSQRFCTGHFGGLHPCNGGGGGSGGGSRDWDFDVFGGGTPVG | |
| | | GHHHHHH | |
| 193. | CH19_0-E11xI2C6-LFcBY- | QRFVTGHFGGLYPANGGGGGSQVQLQESGPGLVKPSQTLSLTCTVSGGSISRGGYYWSWIRQH | |
| | 156 | PGKGLEWIGYIFYRGRTYYNPSLKSRVTISVDTSKNQFSLKLSSVTAADTAVYYCARVNSNYG | |
| | | WFDPWGQGTLVTVSSGGGGSGGGGSGGGGSEIVLTQFPGTLSLSPGERATLSCRASQSVSSSY | |
| | | LAWYQQKPGQAPRLLIYGASSRATGIPDRFSGSGSGIDFILTISRLEPEDFAVYYCQQYGSSP | |
| | | LTFGGGTKLEIKSGGGGSEVQLVESGGGLVQPGGSLKLSCAASGFTFNKYAMNWVRQAPGKGL | |
| | | EWVARIRSKYNNYATYYADSVKDRFTISRDDSKNTAYLQMNNLKTEDTAVYYCVRHGNFGNSY | |
| | | ISYWAYWGQGTLVTVSSGGGGSGGGGSGGGGSQTVVTQEPSLTVSPGGTVTLTCGSSTGAVTS | |
| | | GNYPNWVQQKPGQAPRGLIGGTKFLAPGTPARFSGSLLGGKAALTLSGVQPEDEAEYYCVLWY | |
| | | SNRWVFGGGTKLIVLGGGGSQRFCTGHFGGLHPCNGGGGGSGGGSRDWDFDVFGGGTPVGGHH | |
| | | HHHH | |
| 194. | CH19_5-G4xI2C6-LFcBY- | QRFVTGHFGGLYPANGGGGGSQVQLQESGPGLVKPSQTLSLTCTVSGGSISSGGYYWSWIRQH | |
| | 156 | PGKGLEWIGYIFYRGRTYYNPSLKSRVTISVDTSKNQFSLKLSSVTAADTAVYYCARVYSNYG | |
| | | WFDPWGQGTLVTVSSGGGGSGGGGSGGGGSEIVLTQSPGTLSLSPGERATLSCRASQSVSSSY | |
| | | LAWYQQKPGQAPRLLIYGTSNRATGIPDRFSGSGSGIDFILTISRLEPEDFAVYYCQQYGSSP | |
| | | LTFGGGTKLEIKSGGGGSEVQLVESGGGLVQPGGSLKLSCAASGFTFNKYAMNWVRQAPGKGL | |
| | | EWVARIRSKYNNYATYYADSVKDRFTISRDDSKNTAYLQMNNLKTEDTAVYYCVRHGNFGNSY | |
| | | ISYWAYWGQGTLVTVSSGGGGSGGGGSGGGGSQTVVTQEPSLTVSPGGTVTLTCGSSTGAVTS | |
| | | GNYPNWVQQKPGQAPRGLIGGTKFLAPGTPARFSGSLLGGKAALTLSGVQPEDEAEYYCVLWY | |
| | | SNRWVFGGGTKLTVLGGGGSQRFCTGHFGGLHPCNGGGGGSGGGSRDWDFDVFGGGTPVGGHH | |
| | | HHHH | |
| 195. | CH19_8-H6xI2C6-LFcBY- | QRFVTGHFGGLYPANGGGGGSQVQLQESGPGLVKPSQTLSLTCTVSGGSISSGGYYWSWIRQH | |
| | 156 | PGKGLEWIGYIFYSGRTYYNPSLKSRVTISVDTSKNQFSLKLSSVTAADTAVYYCARVYSNYG | |
| | | WFDPWGQGTLVTVSSGGGGSGGGGSGGGGSEIVLIQSPGILSLSPGERATLSCRASQSVSSSY | |
| | | LAWYQQKPGQAPRLLIYGASSRATGIPDRFSGSGSGTDFTLTISRLEPEDFAVYYCQQYGSSP | |
| | | LTFGGGTKLEIKSGGGGSEVQLVESGGGLVQPGGSLKLSCAASGFTFNKYAMNWVRQAPGKGL | |
| | | EWVARIRSKYNNYATYYADSVKDRFTISRDDSKNTAYLQMNNLKTEDTAVYYCVRHGNFGNSY | |
| | | ISYWAYWGQGTLVTVSSGGGGSGGGGSGGGGSQTVVIQEPSLIVSPGGIVTLICGSSTGAVIS | |
| | | GNYPNWVQQKPGQAPRGLIGGTKFLAPGTPARFSGSLLGGKAALTLSGVQPEDEAEYYCVLWY | |
| | | SNRWVFGGGTKLTVLGGGGSQRFCTGHFGGLHPCNGGGGGSGGGSRDWDFDVFGGGTPVGGHH | |
| | | HHHH | |
| 196. | CH19_2-C11x12C6- | QRFVTGHFGGLYPANGGGGGSQVQLQESGPGLVKPSQTLSLTCTVSGGSISSGGYYWSWIRQH | |
| | LFcBY-156 | PGKGLEWIGYIFYSGRTYYNPSLKSRVTISVDTSKNQFSLKLRSVTAADTAVYYCARVYSNYG | |
| | | WFDPWGQGTLVTVSSGGGGSGGGGSGGGGSEIVLTQSPGTLSLSPGERATLSCRASQSVSSSY | |
| | | LAWYQQKPGQAPRLLIYGASSRATGIPDRFSGSGSGIDFILTISRLEPEDFAVYYCQQYGSSP | |
| | | LTFGGGTKLEIKSGGGGSEVQLVESGGGLVQPGGSLKLSCAASGFTFNKYAMNWVRQAPGKGL | |
| | | EWVARIRSKYNNYATYYADSVKDRFTISRDDSKNTAYLQMNNLKTEDTAVYYCVRHGNFGNSY | |
| | | ISYWAYWGQGTLVTVSSGGGGSGGGGSGGGGSQTVVIQEPSLIVSPGGIVTLICGSSTGAVIS | |
| | | GNYPNWVQQKPGQAPRGLIGGTKFLAPGTPARFSGSLLGGKAALTLSGVQPEDEAEYYCVLWY | |
| | | SNRWVFGGGTKLTVLGGGGSQRFCTGHFGGLHPCNGGGGGSGGGSRDWDFDVFGGGTPVGGHH | |
| | | HHHH | |
| 197. | CH19_2-A10xI2C6- | QRFVTGHFGGLYPANGGGGGSQVQLQESGPGLVKPSQTLSLTCTVSGGSISSGGYYWSWIRQH | |
| | LFcBY-156 | PGKGLEWIGYIYYSGSTFYNPSLRSRVTISVDTSKNQFSLKLSSVTAADTAVYYCARDSSSSR | |
| | | ALDYWGQGTLVTVSSGGGGSGGGGSGGGGSEIVLIQSPGILSLSPGERATLSCRASQSVSSSY | |
| | | LAWYQQKPGQAPRLLIYGASSRATGIPDRFSGSGSGIDFILTISRLEPEDFAVYYCQQYDSSP | |
| | | RTFGQGTKLEIKSGGGGSEVQLVESGGGLVQPGGSLKLSCAASGFTFNKYAMNWVRQAPGKGL | |
| | | EWVARIRSKYNNYATYYADSVKDRFTISRDDSKNTAYLQMNNLKTEDTAVYYCVRHGNFGNSY | |
| | | ISYWAYWGQGTLVTVSSGGGGSGGGGSGGGGSQTVVIQEPSLIVSPGGIVTLICGSSTGAVIS | |
| | | GNYPNWVQQKPGQAPRGLIGGTKFLAPGTPARFSGSLLGGKAALTLSGVQPEDEAEYYCVLWY | |
| | | SNRWVFGGGTKLIVLGGGGSQRFCTGHFGGLHPCNGGGGGSGGGSRDWDFDVFGGGTPVGGHH | |
| | | HHHH | |
| 198. | CH19_1-D11xI2C6- | QRFVTGHFGGLYPANGGGGGSQVQLQESGPGLVKPSQTLSLTCTVSGGSISSGGYYWSWIRQH | |
| | LFcBY-156 | PGKGLEWIGYIYYRGRTYYNPSLKSRVTISVDTSKNQFSLKLSSVTAADTAVYYCARVYSNYG | |
| | | WFDPWGQGTLVTVSSGGGGSGGGGSGGGGSEIVLIQSPGILSLSPGERATLSCRASQSVSSSY | |
| | | LAWYQQKPGQAPRLLIYGASSRATGIPDRFSGSGSGTDFTLTISRLEPEDFAVYYCQQYGSSP | |
| | | LTFGGGTKLEIKSGGGGSEVQLVESGGGLVQPGGSLKLSCAASGFTFNKYAMNWVRQAPGKGL | |
| | | EWVARIRSKYNNYATYYADSVKDRFTISRDDSKNTAYLQMNNLKTEDTAVYYCVRHGNFGNSY | |
| | | ISYWAYWGQGTLVTVSSGGGGSGGGGSGGGGSQTVVTQEPSLTVSPGGTVTLTCGSSTGAVTS | |
| | | GNYPNWVQQKPGQAPRGLIGGTKFLAPGTPARFSGSLLGGKAALTLSGVQPEDEAEYYCVLWY | |
| | | SNRWVFGGGTKLTVLGGGGSQRFCTGHFGGLHPCNGGGGGSGGGSRDWDFDVFGGGTPVGGHH | |
| | | HHHH | |
| 199. | CH19_9-F9xI2C6-LFcBY- | QRFVTGHFGGLYPANGGGGGSQVQLQESGPGLVKPSETLSLTCTVSGGSISSGGYYWSWIRQH | |
| | 156 | PGKGLEWIGYIFYRGRTYYNPSLKSRVTISVDTSKNQFSLKLSSVTAADTAVYYCARVYSNYG | |
| | | WFDPWGQGTLVTVSSGGGGSGGGGSGGGGSEIVLIQSPGILSLSPGERATLSCRASQSVSSSY | |
| | | LAWYQQKPGQAPRLLIYGASSRATGIPDRFSGSGSGTDFTLTISRLEPEDFAVYYCQQYGSSP | |
| | | TFGGGTKVEIKSGGGGSEVQLVESGGGLVQPGGSLKLSCAASGFTFNKYAMNWVRQAPGKGLE | |
| | | WVARIRSKYNNYATYYADSVKDRFTISRDDSKNTAYLQMNNLKTEDTAVYYCVRHGNFGNSYI | |
| | | SYWAYWGQGTLVTVSSGGGGSGGGGSGGGGSQTVVTQEPSLTVSPGGTVTLTCGSSTGAVTSG | |
| | | NYPNWVQQKPGQAPRGLIGGTKFLAPGTPARFSGSLLGGKAALTLSGVQPEDEAEYYCVLWYS | |
| | | NRWVFGGGTKLTVLGGGGSQRFCTGHFGGLHPCNGGGGGSGGGSRDWDFDVFGGGTPVGGHHH | |
| | | HHH | |
| 200. | CH19_1-H8xI2C6-LFcBY- | QRFVTGHFGGLYPANGGGGGSQVQLQESGPGLVKPSQTLSLICTVSGGSISSGGYYWSWIRQH | |
| | 156 | PGKGLEWIGYIFYRGRTYYNPSLKSRVTISVDTSKNQFSLKLSSVTAADTAVYYCARVYSNYG | |
| | | WFDPWGQGTLVTVSSGGGGSGGGGSGGGGSEIVLIQSPGILSLSPGERATLSCRASQSVSSSY | |
| | | LAWYQQKPGQAPRLLIYGASSRATGIPDRFSGSGSGTDFTLTISRLEPEDFAVYYCQQYGSSP | |
| | | LTFGGGTKVEIKSGGGGSEVQLVESGGGLVQPGGSLKLSCAASGFTFNKYAMNWVRQAPGKGL | |
| | | EWVARIRSKYNNYATYYADSVKDRFTISRDDSKNTAYLQMNNLKTEDTAVYYCVRHGNFGNSY | |
| | | ISYWAYWGQGTLVTVSSGGGGSGGGGSGGGGSQTVVIQEPSLIVSPGGIVTLICGSSTGAVIS | |
| | | GNYPNWVQQKPGQAPRGLIGGTKFLAPGTPARFSGSLLGGKAALTLSGVQPEDEAEYYCVLWY | |
| | | SNRWVFGGGTKLIVLGGGGSQRFCTGHFGGLHPCNGGGGGSGGGSRDWDFDVFGGGTPVGGHH | |
| | | HHHH | |
| 201. | CH19_1-B12xI2C6- | QRFVTGHFGGLYPANGGGGGSQVQLQESGPGLVKPSQTLSLTCTVSGGSISSGGYYWSWIRQH | |
| | LFcBY-156 | PGKGLEWIGYIYYRGRTYYNPSLKSRVTISVDTSKNQFSLKLSSVTAADTAVYYCARVYSNYG | |
| | | WFDPWGQGTLVTVSSGGGGSGGGGSGGGGSEIVLTQSPGTLSLSPGERATLSCRASQSVSSSY | |
| | | LAWYQQKPGQAPRLLIYGASSRATGIPDRFSGSGSGIDFILTISRLEPEDFAVYYCQQYGSSP | |
| | | TFGPGTKVEIKSGGGGSEVQLVESGGGLVQPGGSLKLSCAASGFTFNKYAMNWVRQAPGKGLE | |
| | | WVARIRSKYNNYATYYADSVKDRFTISRDDSKNTAYLQMNNLKTEDTAVYYCVRHGNFGNSYI | |
| | | SYWAYWGQGTLVTVSSGGGGSGGGGSGGGGSQTVVTQEPSLTVSPGGTVTLTCGSSTGAVTSG | |
| | | NYPNWVQQKPGQAPRGLIGGTKFLAPGTPARFSGSLLGGKAALTLSGVQPEDEAEYYCVLWYS | |
| | | NRWVFGGGTKLTVLGGGGSQRFCTGHFGGLHPCNGGGGGSGGGSRDWDFDVFGGGTPVGGHHH | |
| | | HHH | |
| 202. | CH19_0-C4xI2C6-LFcBY- | QRFVTGHFGGLYPANGGGGGSQVQLQESGPGLVKPSQTLSLTCTVSGGSISSGGYYWSWIRQH | |
| | 156 | PGKGLEWIGYIYYRGRTYYNPSLKSRVTISVDTSKNQFSLKLSSVTAADTAVYYCARVYSNYG | |
| | | WFDPWGQGTLVTVSSGGGGSGGGGSGGGGSEIVLIQSPGILSLSPGERATLSCRASQSVSSSY | |
| | | LAWYQQKPGQAPRLLIYGASSRATGIPDRFSGSGSGTDFTLTISRLEPEDFAVYYCQQYGSSP | |
| | | TFGGGTKVEIKSGGGGSEVQLVESGGGLVQPGGSLKLSCAASGFTFNKYAMNWVRQAPGKGLE | |
| | | WVARIRSKYNNYATYYADSVKDRFTISRDDSKNTAYLQMNNLKTEDTAVYYCVRHGNFGNSYI | |
| | | SYWAYWGQGTLVTVSSGGGGSGGGGSGGGGSQTVVTQEPSLTVSPGGTVTLTCGSSTGAVTSG | |
| | | NYPNWVQQKPGQAPRGLIGGTKFLAPGTPARFSGSLLGGKAALTLSGVQPEDEAEYYCVLWYS | |
| | | NRWVFGGGTKLTVLGGGGSQRFCTGHFGGLHPCNGGGGGSGGGSRDWDFDVFGGGTPVGGHHH | |
| | | HHH | |
| 203. | CH19_3-F2xI2C6-LFcBY- | QRFVTGHFGGLYPANGGGGGSQVQLQESGPGLVKPSQTLSLTCTISGGSISSGGYYWSWIRQH | |
| | 156 | PGKGLEWIGYIFYSGRTYYNPSLKSRVTISVDTSKNQFSLKLTSVTAADTAVYYCARVNSNYG | |
| | | WFDPWGQGTLVTVSSGGGGSGGGGSGGGGSEIVLIQSPGILSLSPGERATLSCRASQSVSSSY | |
| | | LAWYQQKPGQAPRLLIYGASSRATGIPDRFSGSGSGTDFTLTISRLEPEDFAVYYCQQYGSSP | |
| | | TFGGGTKVEIKSGGGGSEVQLVESGGGLVQPGGSLKLSCAASGFTFNKYAMNWVRQAPGKGLE | |
| | | WVARIRSKYNNYATYYADSVKDRFTISRDDSKNTAYLQMNNLKTEDTAVYYCVRHGNFGNSYI | |
| | | SYWAYWGQGTLVTVSSGGGGSGGGGSGGGGSQTVVTQEPSLTVSPGGTVTLTCGSSTGAVTSG | |
| | | NYPNWVQQKPGQAPRGLIGGIKFLAPGTPARFSGSLLGGKAALTLSGVQPEDEAEYYCVLWYS | |
| | | NRWVFGGGTKLTVLGGGGSQRFCTGHFGGLHPCNGGGGGSGGGSRDWDFDVFGGGTPVGGHHH | |
| | | HHH | |
| 204. | CH19_3-B10xI2C6- | QRFVIGHFGGLYPANGGGGGSQVQLQESGPGLVKPSQTLSLICTVSGGSISSGGYYWSWIRQH | |
| | LFcBY-156 | PGKGLDWIGYIFYRGRTYYNPSLKSRVTISVDTSKNQFSLKLSSVTAADTAVYYCARVNSNYG | |
| | | WFDPWGQGTLVTVSSGGGGSGGGGSGGGGSEIVLIQSPGILSLSPGERATLSCRASQSVSSSY | |
| | | LAWYQQKPGQAPRLLIYGASSRATGIPDRFSGSGSGTDFTLTISRLEPEDFAVYYCQQYGSSP | |
| | | LIFGGGTKVEIKSGGGGSEVQLVESGGGLVQPGGSLKLSCAASGFTFNKYAMNWVRQAPGKGL | |
| | | EWVARIRSKYNNYATYYADSVKDRFTISRDDSKNTAYLQMNNLKTEDTAVYYCVRHGNFGNSY | |
| | | ISYWAYWGQGTLVTVSSGGGGSGGGGSGGGGSQTVVIQEPSLIVSPGGIVTLICGSSIGAVIS | |
| | | GNYPNWVQQKPGQAPRGLIGGTKFLAPGTPARFSGSLLGGKAALTLSGVQPEDEAEYYCVLWY | |
| | | SNRWVFGGGTKLTVLGGGGSQRFCTGHFGGLHPCNGGGGGSGGGSRDWDFDVFGGGTPVGGHH | |
| | | HHHH | |
| 205. | CH19_0-G4xI2C6-LFcBY- | QRFVTGHFGGLYPANGGGGGSQVQLQESGPGLVKPSQTLSLTCTVSGGSISSGGYYWSWIRQH | |
| | 156 | PGKGLEWIGYIYYRGRTYYNPSLKSRVTISVDTSKNQFSLKLSSVTAADTAVYYCARVYSNYG | |
| | | WFDPWGQGTLVTVSSGGGGSGGGGSGGGGSEIVLIQSPGILSLSPGERATLSCRASQSVSSSY | |
| | | LAWYQQKPGQAPRLLIYGASTRATGIPDRFSGSGSGIDFILTISRLEPEDFAVYYCQQYGSSP | |
| | | SFGQGTKVEIKSGGGGSEVQLVESGGGLVQPGGSLKLSCAASGFTFNKYAMNWVRQAPGKGLE | |
| | | WVARIRSKYNNYATYYADSVKDRFTISRDDSKNTAYLQMNNLKTEDTAVYYCVRHGNFGNSYI | |
| | | SYWAYWGQGTLVTVSSGGGGSGGGGSGGGGSQTVVTQEPSLTVSPGGTVTLTCGSSTGAVTSG | |
| | | NYPNWVQQKPGQAPRGLIGGTKFLAPGTPARFSGSLLGGKAALTLSGVQPEDEAEYYCVLWYS | |
| | | NRWVFGGGTKLTVLGGGGSQRFCTGHFGGLHPCNGGGGGSGGGSRDWDFDVFGGGTPVGGHHH | |
| | | HHH | |
| 206. | CH19_0-H5xI2C6-LFcBY- | QRFVTGHFGGLYPANGGGGGSQVQLQESGPGLVRPSQTLSLTCTVSGGSISSGGYYWSWIRQH | |
| | 156 | PGKGLEWIGYIYYRGRTYYNPSLKSRVTISVDTSKNQFSLKLSSVTAADTAVYYCARVYSNYG | |
| | | WFDPWGQGTLVTVSSGGGGSGGGGSGGGGSEIVLIQSPGILSLSPGERATLSCRASQSVSSSY | |
| | | LAWYQQKPGQAPRLLIYGASSRATGIPDRFSGSGSGTDFTLTISRLEPEDFAVYYCQQYDTSP | |
| | | LTFGGGTKVEIKSGGGGSEVQLVESGGGLVQPGGSLKLSCAASGFTFNKYAMNWVRQAPGKGL | |
| | | EWVARIRSKYNNYATYYADSVKDRFTISRDDSKNTAYLQMNNLKTEDTAVYYCVRHGNFGNSY | |
| | | ISYWAYWGQGTLVTVSSGGGGSGGGGSGGGGSQTVVTQEPSLTVSPGGTVTLTCGSSTGAVTS | |
| | | GNYPNWVQQKPGQAPRGLIGGTKFLAPGTPARFSGSLLGGKAALTLSGVQPEDEAEYYCVLWY | |
| | | SNRWVFGGGTKLTVLGGGGSQRFCTGHFGGLHPCNGGGGGSGGGSRDWDFDVFGGGTPVGGHH | |
| | | HHHH | |
| 207. | CH19_0-B8xI2C6-LFc13Y- | QRFVTGHFGGLYPANGGGGGSQVQLQESGPGLVKPSQTLSLTCTVSGGSISSGGYYWSWIRQH | |
| | 156 | PGKGLEWIGYIYYRGRTYYNPSLKSRVTISVDTSKNQFSLKLSSVTAADTAVYYCARVYSNYG | |
| | | WFDPWGQGTLVTVSSGGGGSGGGGSGGGGSEIVLIQSPGILSLSPGERATLSCRASQSVSSSY | |
| | | LAWYQQKPGQAPRLLIYGASSRATGIPDRFSGSGSGTDFTLTISRLEPEDFAVYYCQQYGSSP | |
| | | TFGGGTKVEIKSGGGGSEVQLVESGGGLVQPGGSLKLSCAASGFIFNKYAMNWVRQAPGKGLE | |
| | | WVARIRSKYNNYATYYADSVKDRFTISRDDSKNTAYLQMNNLKTEDTAVYYCVRHGNFGNSYI | |
| | | SYWAYWGQGTLVTVSSGGGGSGGGGSGGGGSQTVVTQEPSLTVSPGGTVTLTCGSSTGAVTSG | |
| | | NYPNWVQQKPGQAPRGLIGGIKFLAPGTPARFSGSLLGGKAALTLSGVQPEDEAEYYCVLWYS | |
| | | NRWVFGGGTKLTVLGGGGSQRFCTGHFGGLHPCNGGGGGSGGGSRDWDFDVFGGGTPVGGHHH | |
| | | HHH | |
| 208. | CH19_2-D9xI2C6-LFcBY- | QRFVTGHFGGLYPANGGGGGSQVQLQESGPGLVKPSQTLSLTCTVSGGSISSGGYYWSWIRQH | |
| | 156 | PGKGLEWIGYIYYRGRTYYNPSLKSRVTISVDTSKNQFSLKLSSVTAADTAVYYCARVYSNYG | |
| | | WFDPWGQGTLVTVSSGGGGSGGGGSGGGGSEIVLTQSPGTLSLSPGERATLSCRASQSVSSSY | |
| | | LAWYQQKPGQAPRLLIYGASSRATGIPDRFSGSGSGTDFTLTISRLEPEDFAVYYCQQYGSSP | |
| | | LTFGGGTKVEIKSGGGGSEVQLVESGGGLVQPGGSLKLSCAASGFTFNKYAMNWVRQAPGKGL | |
| | | EWVARIRSKYNNYATYYADSVKDRFTISRDDSKNTAYLQMNNLKTEDTAVYYCVRHGNFGNSY | |
| | | ISYWAYWGQGTLVTVSSGGGGSGGGGSGGGGSQTVVIQEPSLIVSPGGIVTLICGSSTGAVTS | |
| | | GNYPNWVQQKPGQAPRGLIGGTKFLAPGTPARFSGSLLGGKAALTLSGVQPEDEAEYYCVLWY | |
| | | SNRWVFGGGTKLTVLGGGGSQRFCTGHFGGLHPCNGGGGGSGGGSRDWDFDVFGGGTPVGGHH | |
| | | HHHH | |
| 209. | CH19_8-H7xI2C6-LFcBY- | QRFVTGHFGGLYPANGGGGGSQVQLQESGPGLVKPSQTLSLICTVSGGSISSGGYYWSWVRQH | |
| | 156 | PGKGLEWIGYIFYSGRTYYNPSLKSRVIISVDTSKNQFSLKLSSVTAADTAVYYCARVYSNYG | |
| | | WFDPWGQGTLVTVSSGGGGSGGGGSGGGGSEIVLTQSPGTLSLSPGERATLSCRASQSVSSSY | |
| | | LAWYQQKPGQAPRLLIYGASSRATGIPDRFSGSGSGTDFTLTISRLEPEDFAVYYCQQYGSSP | |
| | | LTFGGGTKVEIKSGGGGSEVQLVESGGGLVQPGGSLKLSCAASGFTFNKYAMNWVRQAPGKGL | |
| | | EWVARIRSKYNNYATYYADSVKDRFTISRDDSKNTAYLQMNNLKTEDTAVYYCVRHGNFGNSY | |
| | | ISYWAYWGQGTLVTVSSGGGGSGGGGSGGGGSQTVVTQEPSLTVSPGGTVTLICGSSTGAVTS | |
| | | GNYPNWVQQKPGQAPRGLIGGTKFLAPGTPARFSGSLLGGKAALTLSGVQPEDEAEYYCVLWY | |
| | | SNRWVFGGGTKLTVLGGGGSQRFCTGHFGGLHPCNGGGGGSGGGSRDWDFDVFGGGTPVGGHH | |
| | | HHHH | |
| 210. | CH19_9-C2xI2C6-LFcBY- | QRFVTGHFGGLYPANGGGGGSQVQLQESGPGLVKPSQTLSLTCTVSGGSISSGGYYWSWIRQH | |
| | 156 | PGKGLEWIGYIFYSGRTYYNPSLKSRVTISVDTSKNQFSLKLSSVTAADTAVYYCARVYSNYG | |
| | | WFDPWGQGTLVTVSSGGGGSGGGGSGGGGSEIVLTQSPGTLSLSPGERATLSCRASQSVSSSY | |
| | | LAWYQQKPGQAPRLLIYGASSRATGIPDRFSGSGSGIDFILTISRLEPEDFAVYYCQQYGSSP | |
| | | LTFGGGTKVEIKSGGGGSEVQLVESGGGLVQPGGSLKLSCAASGFTFNKYAMNWVRQAPGKGL | |
| | | EWVARIRSKYNNYATYYADSVKDRFTISRDDSKNTAYLQMNNLKTEDTAVYYCVRHGNFGNSY | |
| | | ISYWAYWGQGTLVTVSSGGGGSGGGGSGGGGSQTVVTQEPSLTVSPGGTVTLTCGSSTGAVTS | |
| | | GNYPNWVQQKPGQAPRGLIGGTKFLAPGTPARFSGSLLGGKAALTLSGVQPEDEAEYYCVLWY | |
| | | SNRWVFGGGTKLIVLGGGGSQRFCTGHFGGLHPCNGGGGGSGGGSRDWDFDVFGGGTPVGGHH | |
| | | HHHH | |
| 211. | CH19_3-D5xI2C6-LFcBY- | QRFVTGHFGGLYPANGGGGGSQVQLQESGPGLVKPSQTLSLTCTVSGGSISSGGYYWSWIRQH | |
| | 156 | PGKGLEWIGYIFYSGRTYYNPSLKSRVSISVDTSKNQFSLKLSSVTAADTAVYYCARVYSNYG | |
| | | WFDPWGQGTLVTVSSGGGGSGGGGSGGGGSEIVLIQSPGILSLSPGERATLSCRASQSVSSSY | |
| | | LAWYQQKPGQAPRLLIYGASSRATGIPDRFSGSGSGTDFTLTISRLEPEDFAVYYCQQYGSSP | |
| | | LTFGGGTKVEIKSGGGGSEVQLVESGGGLVQPGGSLKLSCAASGFTFNKYAMNWVRQAPGKGL | |
| | | EWVARIRSKYNNYATYYADSVKDRFTISRDDSKNTAYLQMNNLKTEDTAVYYCVRHGNFGNSY | |
| | | ISYWAYWGQGTLVTVSSGGGGSGGGGSGGGGSQTVVTQEPSLTVSPGGTVTLTCGSSTGAVTS | |
| | | GNYPNWVQQKPGQAPRGLIGGTKFLAPGTPARFSGSLLGGKAALTLSGVQPEDEAEYYCVLWY | |
| | | SNRWVFGGGTKLTVLGGGGSQRFCTGHFGGLHPCNGGGGGSGGGSRDWDFDVFGGGTPVGGHH | |
| | | HHHH | |
| 212. | CH19_1-G11xI2C6- | QRFVTGHFGGLYPANGGGGGSQVQLQESGPGLVKPSETLSLTCTVSGGSVSSGGYYWSWIRQP | |
| | LFcBY-156 | PGKGLEWIGYIYYRGRTYYNPSLKSRVTISVDTSKNQFSLKLSSVTAADTAVYYCARVYSNYG | |
| | | WFDPWGQGTLVTVSSGGGGSGGGGSGGGGSEIVLIQSPGILSLSPGERATLSCRASQSVSSSY | |
| | | LAWYQQKPGQAPRLLIYGASSRATGIPDRFSGSGSGTDFTLTISRLEPEDFAVYYCQQYGSSP | |
| | | LTFGGGTKVEIKSGGGGSEVQLVESGGGLVQPGGSLKLSCAASGFTFNKYAMNWVRQAPGKGL | |
| | | EWVARIRSKYNNYATYYADSVKDRFTISRDDSKNTAYLQMNNLKTEDTAVYYCVRHGNFGNSY | |
| | | ISYWAYWGQGTLVTVSSGGGGSGGGGSGGGGSQTVVTQEPSLTVSPGGTVTLTCGSSTGAVTS | |
| | | GNYPNWVQQKPGQAPRGLIGGTKFLAPGTPARFSGSLLGGKAALTLSGVQPEDEAEYYCVLWY | |
| | | SNRWVFGGGTKLIVLGGGGSQRFCTGHFGGLHPCNGGGGGSGGGSRDWDFDVFGGGTPVGGHH | |
| | | HHHH | |
| 213. | CH19_1-H11xI2C6- | QRFVTGHFGGLYPANGGGGGSQVQLQESGPGLVKPSQTLSLICTVSGGSISSGGYYWSWIRQH | |
| | LFcBY-156 | PGKGLEWIGYIYYRGRTYYNPSLKSRVTISVDTSKNQFSLKLSSVTAADTAVYYCARVYSNYG | |
| | | WFDPWGQGTLVTVSSGGGGSGGGGSGGGGSEIVLIQSPGILSLSPGERATLSCRASQSVSSSY | |
| | | LAWYQQKPGQAPRLLIYGASSRATGIPDRFSGSGSGTDFTLTISRLEPEDFAVYYCQQYGSSP | |
| | | TFGQGTRLEIKSGGGGSEVQLVESGGGLVQPGGSLKLSCAASGFTFNKYAMNWVRQAPGKGLE | |
| | | WVARIRSKYNNYATYYADSVKDRFTISRDDSKNTAYLQMNNLKTEDTAVYYCVRHGNFGNSYI | |
| | | SYWAYWGQGTLVTVSSGGGGSGGGGSGGGGSQTVVTQEPSLTVSPGGTVTLTCGSSTGAVTSG | |
| | | NYPNWVQQKPGQAPRGLIGGTKFLAPGTPARFSGSLLGGKAALTLSGVQPEDEAEYYCVLWYS | |
| | | NRWVFGGGTKLTVLGGGGSQRFCTGHFGGLHPCNGGGGGSGGGSRDWDFDVFGGGTPVGGHHH | |
| | | HHH | |
| 214. | CH19_9-F3xI2C6-LFcBY- | QRFVTGHFGGLYPANGGGGGSQVQLQESGPGLVKPSQTLSLTCTVSGGSISSGGYYWSWIRQH | |
| | 156 | PGKGLEWIGYIFYSGKTYYNPSLKSRVSISVDTSKNQFSLKLSSVTAADTAVYYCARVYSNYG | |
| | | WFDPWGQGTLVTVSSGGGGSGGGGSGGGGSEIVLIQSPGILSLSPGERATLSCRASQSVSSSY | |
| | | LAWYQQKPGQAPRLLIYGASSRATGIPDRFSGSGSGIDFILTISRLEPEDFAVYYCQQYGSSP | |
| | | ITFGQGTRLEIKSGGGGSEVQLVESGGGLVQPGGSLKLSCAASGFTFNKYAMNWVRQAPGKGL | |
| | | EWVARIRSKYNNYATYYADSVKDRFTISRDDSKNTAYLQMNNLKTEDTAVYYCVRHGNFGNSY | |
| | | ISYWAYWGQGTLVTVSSGGGGSGGGGSGGGGSQTVVTQEPSLTVSPGGTVTLTCGSSTGAVTS | |
| | | GNYPNWVQQKPGQAPRGLIGGTKFLAPGTPARFSGSLLGGKAALTLSGVQPEDEAEYYCVLWY | |
| | | SNRWVFGGGTKLTVLGGGGSQRFCTGHFGGLHPCNGGGGGSGGGSRDWDFDVFGGGTPVGGHH | |
| | | HHHH | |
| 215. | CH19_2-G6xI2C6-LFcBY- | QRFVTGHFGGLYPANGGGGGSQVQLQESGPGLVKPSETLSLTCTVSGGSISSYYWSWIRQPPG | |
| | 156 | KGLEWIGYIYYSGSTNYNPSLKSRVTMSIDTSKNQFSLKLISVTAADTAVYYCARDQRRIVAA | |
| | | GGYYYGMDVWGQGTIVIVSSGGGGSGGGGSGGGGSEIVLIQSPGILSLSPGERATLSCRASQS | |
| | | VSSSYLAWYQQKPGQAPRLLIYGASTRATGIPARFSGSGSGTDFTLTISRLEPEDFAVYYCQQ | |
| | | YGSSPFTFGPGTKVDIKSGGGGSEVQLVESGGGLVQPGGSLKLSCAASGFTFNKYAMNWVRQA | |
| | | PGKGLEWVARIRSKYNNYATYYADSVKDRFTISRDDSKNTAYLQMNNLKTEDTAVYYCVRHGN | |
| | | FGNSYISYWAYWGQGTLVTVSSGGGGSGGGGSGGGGSQTVVTQEPSLTVSPGGTVTLTCGSST | |
| | | GAVTSGNYPNWVQQKPGQAPRGLIGGTKFLAPGTPARFSGSLLGGKAALTLSGVQPEDEAEYY | |
| | | CVLWYSNRWVFGGGTKLTVLGGGGSQRFCTGHFGGLHPCNGGGGGSGGGSRDWDFDVFGGGTP | |
| | | VGGHHHHHH | |
| 216. | CH19_2-H7xI2C6-LFcBY- | QRFVTGHFGGLYPANGGGGGSQVQLQESGPGLVKPSQTLSLTCTVSGGSISSNDYYWSWIRQH | |
| | 156 | PGKGLEWIGYIYYSGSTFYNPSLKSRGAISVDTSKNQFSLKLTSVTAADTAVYYCARGVYRIG | |
| | | AFDIWGQGTMVTVSSGGGGSGGGGSGGGGSDIQMTQSPSSLSASVGDRVTITCRASQSISSYL | |
| | | NWYQQKPGKAPKSLIYAASSLQSGVPSKFSGSGSGTDFTLTISSLQPEDIATYYCQQSYSTPQ | |
| | | AFGGGTKVDIKSGGGGSEVQLVESGGGLVQPGGSLKLSCAASGFTFNKYAMNWVRQAPGKGLE | |
| | | WVARIRSKYNNYATYYADSVKDRFTISRDDSKNTAYLQMNNLKTEDTAVYYCVRHGNFGNSYI | |
| | | SYWAYWGQGTLVTVSSGGGGSGGGGSGGGGSQTVVTQEPSLTVSPGGTVTLTCGSSTGAVTSG | |
| | | NYPNWVQQKPGQAPRGLIGGIKFLAPGTPARFSGSLLGGKAALTLSGVQPEDEAEYYCVLWYS | |
| | | NRWVFGGGTKLTVLGGGGSQRFCTGHFGGLHPCNGGGGGSGGGSRDWDFDVFGGGTPVGGHHH | |
| | | HHH | |
| 217. | CH19_5-B3xI2C6-LFcBY- | QRFVTGHFGGLYPANGGGGGSQVQLVQSGAEVKKPGASVKVSCKASGYTFTYYGISWVRQAPG | |
| | 156 | QGLEWMGWINPYGGETNYAQKLQGRVIMITDTSTSTAYMELRSLRSDDTAVYYCARGSGGFDY | |
| | | WGQGTLVTVSSGGGGSGGGGSGGGGSDIVMTQTPLSLSVTPGEPASISCRSSQSLLHSNGYNY | |
| | | LDWYLQKPGQSPQLLIYLGSYRASGVPDRFSGSGSGIDFTLKISRVEAEDVGVYYCMQALQTP | |
| | | FTFGPGTKVDIKSGGGGSEVQLVESGGGLVQPGGSLKLSCAASGFTFNKYAMNWVRQAPGKGL | |
| | | EWVARIRSKYNNYATYYADSVKDRFTISRDDSKNTAYLQMNNLKTEDTAVYYCVRHGNFGNSY | |
| | | ISYWAYWGQGTLVTVSSGGGGSGGGGSGGGGSQTVVIQEPSLIVSPGGIVTLICGSSTGAVIS | |
| | | GNYPNWVQQKPGQAPRGLIGGTKFLAPGTPARFSGSLLGGKAALTLSGVQPEDEAEYYCVLWY | |
| | | SNRWVFGGGTKLIVLGGGGSQRFCTGHFGGLHPCNGGGGGSGGGSRDWDFDVFGGGTPVGGHH | |
| | | HHHH | |
| 218. | CH19_5-E10xI2C6-LFcBY- | QRFVTGHFGGLYPANGGGGGSQVQLVQSGAEVKKPGASVKVSCKASGYTFTYYGISWVRQAPG | |
| | 156 | QGLEWMGWINPYSGATNYAQKLQGRVTMTTDTSTSTAYMELRSLRSDDTAVYYCARGSGGFDY | |
| | | WGQGILVTVSSGGGGSGGGGSGGGGSDIVMTQTPLSLSVTPGEPASISCRSSQSLLHSNGYNY | |
| | | LDWYLQKPGQSPQLLTYLGSYRASGVPDRFSGSGSGIDFTLKISRVEAEDVGVYYCMQALQTP | |
| | | FTFGPGTKVDIKSGGGGSEVQLVESGGGLVQPGGSLKLSCAASGFTFNKYAMNWVRQAPGKGL | |
| | | EWVARIRSKYNNYATYYADSVKDRFTISRDDSKNTAYLQMNNLKTEDTAVYYCVRHGNFGNSY | |
| | | ISYWAYWGQGTLVTVSSGGGGSGGGGSGGGGSQTVVTQEPSLTVSPGGTVTLTCGSSTGAVTS | |
| | | GNYPNWVQQKPGQAPRGLIGGTKFLAPGTPARFSGSLLGGKAALTLSGVQPEDEAEYYCVLWY | |
| | | SNRWVFGGGTKLTVLGGGGSQRFCTGHFGGLHPCNGGGGGSGGGSRDWDFDVFGGGTPVGGHH | |
| | | HHHH | |
| 219. | CH19_6-G10xI2C6- | QRFVTGHFGGLYPANGGGGGSQVQLVQSGAEVKKPGASVKVSCKASGYTFTYYGISWVRQAPG | |
| | LFcBY-156 | QGLEWMGWINPYIGKTNYAQKLQGRVIMITDTSTSTAYMELRSLRSDDTAVYYCARGSGGFDY | |
| | | WGQGILVTVSSGGGGSGGGGSGGGGSDIVMTQTPLSLSVTPGEPASISCRSSQSLLHSNGYNY | |
| | | LDWYLQKPGQSPQLLIYLGSYRASGVPDRFSGSGSGTDFTLKISRVEAEDVGVYYCMQALQTP | |
| | | FTFGPGTKVDIKSGGGGSEVQLVESGGGLVQPGGSLKLSCAASGFTFNKYAMNWVRQAPGKGL | |
| | | EWVARIRSKYNNYATYYADSVKDRFTISRDDSKNTAYLQMNNLKTEDTAVYYCVRHGNFGNSY | |
| | | ISYWAYWGQGTLVTVSSGGGGSGGGGSGGGGSQTVVTQEPSLTVSPGGTVTLTCGSSTGAVTS | |
| | | GNYPNWVQQKPGQAPRGLIGGTKFLAPGTPARFSGSLLGGKAALTLSGVQPEDEAEYYCVLWY | |
| | | SNRWVFGGGTKLTVLGGGGSQRFCTGHFGGLHPCNGGGGGSGGGSRDWDFDVFGGGTPVGGHH | |
| | | HHHH | |
| 220. | CH19_4-H8xI2C6-LFcBY- | QRFVTGHFGGLYPANGGGGGSQVQLVQSGAEVKKPGASVKVSCKASGYTFTYYGISWVRQAPG | |
| | 156 | QGLEWMGWINPYTGKTNYAQKLQGRVTMTTDTSTSTAYMELRSLRSDDTAVYYCARGSGGFDY | |
| | | WGQGILVTVSSGGGGSGGGGSGGGGSDIVMTQTPLSLSVTPGEPASISCRSSQSLLHSVGYNY | |
| | | LDWYLQKPGQSPQLLIYLGSYRASGVPDRFSGSGSGTDFTLKISRVEAEDVGVYYCMQALQTP | |
| | | FTFGPGTKVDIKSGGGGSEVQLVESGGGLVQPGGSLKLSCAASGFTFNKYAMNWVRQAPGKGL | |
| | | EWVARIRSKYNNYATYYADSVKDRFTISRDDSKNTAYLQMNNLKTEDTAVYYCVRHGNFGNSY | |
| | | ISYWAYWGQGTLVTVSSGGGGSGGGGSGGGGSQTVVTQEPSLTVSPGGTVTLTCGSSTGAVTS | |
| | | GNYPNWVQQKPGQAPRGLIGGTKFLAPGTPARFSGSLLGGKAALTLSGVQPEDEAEYYCVLWY | |
| | | SNRWVFGGGTKLTVLGGGGSQRFCTGHFGGLHPCNGGGGGSGGGSRDWDFDVFGGGTPVGGHH | |
| | | HHHH | |
| 221. | CH19_2-E4xI2C6-LFcBY- | QRFVTGHFGGLYPANGGGGGSQVQLVQSGAEVKKPGASVKVSCKASGYTFTSYGISWVRQAPG | |
| | 156 | QGLEWMGWINPYIGNRNYAQKVQDRVIMITDTSTNTAYMELSSLRSDDTAVYYCARGSGGFDY | |
| | | WGQGTLVTVSSGGGGSGGGGSGGGGSDIVMTQSPLSLPVTLGQPASISCRSSQSLLHSVGYNY | |
| | | LDWYLQKPGQSPQLLIYLGSNRASGVPDRFSGSGSGIDFTLKISRVEAEDVGVYYCMQALQTP | |
| | | FTFGPGTKLEIKSGGGGSEVQLVESGGGLVQPGGSLKLSCAASGFTFNKYAMNWVRQAPGKGL | |
| | | EWVARIRSKYNNYATYYADSVKDRFTISRDDSKNTAYLQMNNLKTEDTAVYYCVRHGNFGNSY | |
| | | ISYWAYWGQGTLVTVSSGGGGSGGGGSGGGGSQTVVIQEPSLIVSPGGIVTLICGSSTGAVIS | |
| | | GNYPNWVQQKPGQAPRGLIGGTKFLAPGTPARFSGSLLGGKAALTLSGVQPEDEAEYYCVLWY | |
| | | SNRWVFGGGTKLTVLGGGGSQRFCTGHFGGLHPCNGGGGGSGGGSRDWDFDVFGGGTPVGGHH | |
| | | HHHH | |
| 222. | CH19_6-B8xI2C6-LFcBY- | QRFVTGHFGGLYPANGGGGGSQVQLVQSGAEVKKPGASVKVSCKASGYTFTYYGISWVRQAPG | |
| | 156 | QGLEWMGWINPYTGKTNYAQKLQDRVTMTTDTSTNTAYMELRSLRSDDTAVYYCARGSGGFDY | |
| | | WGQGTLVTVSSGGGGSGGGGSGGGGSDIVMTQTPLSLPVTPGEPASISCRSSQSLLHSVGYNY | |
| | | LDWYLQKPGQSPQLLIYLGSNRASGVPDRFSGSGSGTDFTLKISRVEAEDVGVYYCMQALQTP | |
| | | FTFGPGTKVDIKSGGGGSEVQLVESGGGLVQPGGSLKLSCAASGFTFNKYAMNWVRQAPGKGL | |
| | | EWVARIRSKYNNYATYYADSVKDRFTISRDDSKNTAYLQMNNLKTEDTAVYYCVRHGNFGNSY | |
| | | ISYWAYWGQGTLVTVSSGGGGSGGGGSGGGGSQTVVTQEPSLTVSPGGTVTLICGSSTGAVIS | |
| | | GNYPNWVQQKPGQAPRGLIGGTKFLAPGTPARFSGSLLGGKAALTLSGVQPEDEAEYYCVLWY | |
| | | SNRWVFGGGTKLTVLGGGGSQRFCTGHFGGLHPCNGGGGGSGGGSRDWDFDVFGGGTPVGGHH | |
| | | HHHH | |
| 223. | CH19_0-B4xI2C6-LFcBY- | QRFVTGHFGGLYPANGGGGGSQVQLVQSGAEVKKPGASVKVSCKASGYTFTTYGISWVRQAPG | |
| | 156 | QGLEWMGWINPYTGKTNYAQKLQGRVTMATDTSTSTAYMELRSLRSDDTAVYYCARGSGGFDY | |
| | | WGQGTLVTVSSGGGGSGGGGSGGGGSDIVMTQSPLSLPVTPGEPASISCRSSQSLLHSVGYNY | |
| | | LDWYLQKPGQSPQLLIYLGSNRASGVPDRFSGSGSGTDFTLKISRVEAEDVGVYYCMQALQTP | |
| | | FTFGPGTKLEIKSGGGGSEVQLVESGGGLVQPGGSLKLSCAASGFTFNKYAMNWVRQAPGKGL | |
| | | EWVARIRSKYNNYATYYADSVKDRFTISRDDSKNTAYLQMNNLKTEDTAVYYCVRHGNFGNSY | |
| | | ISYWAYWGQGTLVTVSSGGGGSGGGGSGGGGSQTVVTQEPSLTVSPGGTVTLTCGSSTGAVTS | |
| | | GNYPNWVQQKPGQAPRGLIGGTKFLAPGTPARFSGSLLGGKAALTLSGVQPEDEAEYYCVLWY | |
| | | SNRWVFGGGTKLTVLGGGGSQRFCTGHFGGLHPCNGGGGGSGGGSRDWDFDVFGGGTPVGGHH | |
| | | HHHH | |
| 224. | CH19_9-F1xI2C6-LFcBY- | QRFVTGHFGGLYPANGGGGGSQVQLVQSGAEVKEPGASVKVSCKASGYTFTYYGISWVRQAPG | |
| | 156 | QGLEWMGWINPYTGNRNYAQKVQDRVTMTTDTSTNTAYMELRSLRSDDTAVYYCARGSGGFDY | |
| | | WGQGTLVTVSSGGGGSGGGGSGGGGSDIVMTQSPLSLPVTPGEPASISCRSSQSLLHSVGYNY | |
| | | LDWYLQKPGQSPQLLIYLGSNRASGVPDRFSGSGSGTDFTLKISRVEAEDVGVYYCMQALQTP | |
| | | FTFGPGTKLEIKSGGGGSEVQLVESGGGLVQPGGSLKLSCAASGFTFNKYAMNWVRQAPGKGL | |
| | | EWVARIRSKYNNYATYYADSVKDRFTISRDDSKNTAYLQMNNLKTEDTAVYYCVRHGNFGNSY | |
| | | ISYWAYWGQGTLVTVSSGGGGSGGGGSGGGGSQTVVTQEPSLTVSPGGTVTLTCGSSTGAVTS | |
| | | GNYPNWVQQKPGQAPRGLIGGTKFLAPGTPARFSGSLLGGKAALTLSGVQPEDEAEYYCVLWY | |
| | | SNRWVFGGGTKLTVLGGGGSQRFCTGHFGGLHPCNGGGGGSGGGSRDWDFDVFGGGTPVGGHH | |
| | | HHHH | |
| 225. | CH19_4-A7xI2C6-LFcBY- | QRFVTGHFGGLYPANGGGGGSQVQLVQSGAEVKKPGASVKVSCKASGYTFTYYGISWVRQAPG | |
| | 156 | QGLEWMGWINPYIGKTNYAQKLQGRVIMITDTSTSTAYMELRSLRSDDTAVYYCARGSGGFDY | |
| | | WGQGTLVTVSSGGGGSGGGGSGGGGSDIVMTQSPLSLPVTPGEPASISCRSSQSLLHSVGYNY | |
| | | LDWYLQKPGQSPQLLIYLGSNRASGVPDRFSGSGSGIDFTLKISRVEAEDVGVYYCMQALQIP | |
| | | FTFGPGTKVEIKSGGGGSEVQLVESGGGLVQPGGSLKLSCAASGFTFNKYAMNWVRQAPGKGL | |
| | | EWVARIRSKYNNYATYYADSVKDRFTISRDDSKNTAYLQMNNLKTEDTAVYYCVRHGNFGNSY | |
| | | ISYWAYWGQGTLVTVSSGGGGSGGGGSGGGGSQTVVTQEPSLTVSPGGTVTLTCGSSTGAVTS | |
| | | GNYPNWVQQKPGQAPRGLIGGTKFLAPGTPARFSGSLLGGKAALTLSGVQPEDEAEYYCVLWY | |
| | | SNRWVFGGGIKLTVLGGGGSQRFCIGHFGGLHPCNGGGGGSGGGSRDWDFDVFGGGIPVGGHH | |
| | | HHHH | |
| 226. | CH19_6-E12xI2C6-LFcBY- | QRFVTGHFGGLYPANGGGGGSQVQLVQSGAEVKKPGASVKVSCKASGYTFTSYGITWVRQAPG | |
| | 156 | QGLEWMGWINPYIGNRNYAQKVQGRVTMTTDTSTSTAYMELRSLRSDDIAVYYCARGSGGFDY | |
| | | WGQGTLVTVSSGGGGSGGGGSGGGGSDIVMTQSPLSLSVTPGEPASISCRSSQSLLHSVGYNY | |
| | | LDWYLQKPGQSPQLLIYLGSNRASGVPDRFSGSGSGIDFTLKISRVEAEDVGVYYCMQALQIP | |
| | | FTFGPGTKVDIKSGGGGSEVQLVESGGGLVQPGGSLKLSCAASGFTFNKYAMNWVRQAPGKGL | |
| | | EWVARIRSKYNNYATYYADSVKDRFTISRDDSKNTAYLQMNNLKTEDTAVYYCVRHGNFGNSY | |
| | | ISYWAYWGQGTLVTVSSGGGGSGGGGSGGGGSQTVVIQEPSLIVSPGGIVTLICGSSIGAVIS | |
| | | GNYPNWVQQKPGQAPRGLIGGTKFLAPGTPARFSGSLLGGKAALTLSGVQPEDEAEYYCVLWY | |
| | | SNRWVFGGGIKLTVLGGGGSQRFCIGHFGGLHPCNGGGGGSGGGSRDWDFDVFGGGIPVGGHH | |
| | | HHHH | |
| 227. | CH19_6-C12x12C6- | QRFVTGHFGGLYPANGGGGGSQVQLVQSGAEVKKPGASVKVSCKASGYTFTSYGISWVRQAPG | |
| | LFcBY-156 | QGLEWMGWINPYTGNRNYAQKFQGRVTMTTDTSTNTAYMELSSLRSEDIAVYYCARGSGGFDY | |
| | | WGQGILVTVSSGGGGSGGGGSGGGGSDIVMTQSPLSLPVTPGEPASISCRSSQSLLHSVGYNY | |
| | | LDWYLQKPGQSPQLLIYLGSNRASGVPDRFSGSGSGIDFTLKISRVEAEDVGVYYCMQALQIP | |
| | | FTFGPGTKVDIKSGGGGSEVQLVESGGGLVQPGGSLKLSCAASGFTFNKYAMNWVRQAPGKGL | |
| | | EWVARIRSKYNNYATYYADSVKDRFTISRDDSKNTAYLQMNNLKTEDTAVYYCVRHGNFGNSY | |
| | | ISYWAYWGQGTLVTVSSGGGGSGGGGSGGGGSQTVVTQEPSLTVSPGGTVTLTCGSSTGAVTS | |
| | | GNYPNWVQQKPGQAPRGLIGGTKFLAPGTPARFSGSLLGGKAALTLSGVQPEDEAEYYCVLWY | |
| | | SNRWVFGGGTKLTVLGGGGSQRFCTGHFGGLHPCNGGGGGSGGGSRDWDFDVFGGGTPVGGHH | |
| | | HHHH | |
| 228. | CH19_6-A7xI2C6-LFcBY- | QRFVTGHFGGLYPANGGGGGSQVQLVQSGAEVKKPGASVKVSCKASGYSFTSYGISWVRQAPG | |
| | 156 | QGLEWMGWINPYTGNRNYAQKVQGRVTMTTDTSTSTAYMELRSLRSDDTAVYYCARGSGGFDY | |
| | | WGQGILVTVSSGGGGSGGGGSGGGGSDIVMTQSPLSLPVTPGEPASISCRSSQSLLHSVGYNY | |
| | | LDWYLQKPGQSPQLLIYLGSNRASGVPDRFSGSGSGTDFTLKISRVEAEDVGVYYCMQALQTP | |
| | | FTFGPGTKVEIKSGGGGSEVQLVESGGGLVQPGGSLKLSCAASGFTFNKYAMNWVRQAPGKGL | |
| | | EWVARIRSKYNNYATYYADSVKDRFTISRDDSKNTAYLQMNNLKTEDTAVYYCVRHGNFGNSY | |
| | | ISYWAYWGQGTLVTVSSGGGGSGGGGSGGGGSQTVVIQEPSLIVSPGGIVTLICGSSIGAVIS | |
| | | GNYPNWVQQKPGQAPRGLIGGTKFLAPGTPARFSGSLLGGKAALTLSGVQPEDEAEYYCVLWY | |
| | | SNRWVFGGGTKLTVLGGGGSQRFCTGHFGGLHPCNGGGGGSGGGSRDWDFDVFGGGTPVGGHH | |
| | | HHHH | |
| 229. | CH19_6-G8xI2C6-LFcBY- | QRFVIGHFGGLYPANGGGGGSQVQLVQSGAEVKKPGASVKVSCKASGYTFTYYGISWVRQAPG | |
| | 156 | QGLEWMGWINPYTGKTNYAQKVQGRVTMTTDTSTSTAYMELRNLRSDDTAVYYCARGSGGFDY | |
| | | WGQGTLVTVSSGGGGSGGGGSGGGGSDIVMTQTPLSLSVTPGQPASISCRSSQSLLHSVGYNY | |
| | | LDWYLQKPGQSPQLLTYLGSNRASGVPDRFSGSGSGIDFTLKISRVEAEDVGVYYCMQALQIP | |
| | | FTFGPGTKVDIKSGGGGSEVQLVESGGGLVQPGGSLKLSCAASGFTFNKYAMNWVRQAPGKGL | |
| | | EWVARIRSKYNNYATYYADSVKDRFTISRDDSKNTAYLQMNNLKTEDTAVYYCVRHGNFGNSY | |
| | | ISYWAYWGQGTLVTVSSGGGGSGGGGSGGGGSQTVVIQEPSLIVSPGGIVTLICGSSIGAVIS | |
| | | GNYPNWVQQKPGQAPRGLIGGTKFLAPGTPARFSGSLLGGKAALTLSGVQPEDEAEYYCVLWY | |
| | | SNRWVFGGGIKLTVLGGGGSQRFCIGHFGGLHPCNGGGGGSGGGSRDWDFDVFGGGIPVGGHH | |
| | | HHHH | |
| 230. | CH19_6-F9xI2C6-LFcBY- | QRFVTGHFGGLYPANGGGGGSQVQLVQSGAEVKKPGASVKVSCKASGYTFTYYGISWVRQAPG | |
| | 156 | QGLEWMGWINPYIGKTNYAQKLQGRVIMITDTSTSTAYMELRSLRSDDTAVYYCARGSGGFDY | |
| | | WGQGTLVTVSSGGGGSGGGGSGGGGSDIVMTQTPLSLSVTPGQPASISCRSSQSLLHSVGYNY | |
| | | LDWYLQKPGQSPQLLTYLGSNRASGVPDRFSGSGSGIDFTLKISRVEAEDVGVYYCMQALQIP | |
| | | FTFGPGTKVDIKSGGGGSEVQLVESGGGLVQPGGSLKLSCAASGFTFNKYAMNWVRQAPGKGL | |
| | | EWVARIRSKYNNYATYYADSVKDRFTISRDDSKNTAYLQMNNLKTEDTAVYYCVRHGNFGNSY | |
| | | ISYWAYWGQGTLVTVSSGGGGSGGGGSGGGGSQTVVIQEPSLIVSPGGIVTLICGSSIGAVIS | |
| | | GNYPNWVQQKPGQAPRGLIGGTKFLAPGTPARFSGSLLGGKAALTLSGVQPEDEAEYYCVLWY | |
| | | SNRWVFGGGTKLTVLGGGGSQRFCTGHFGGLHPCNGGGGGSGGGSRDWDFDVFGGGTPVGGHH | |
| | | HHHH | |
| 231. | CH19_0-C11xI2C6- | QRFVTGHFGGLYPANGGGGGSQVQLVESGGGVVQPGRSLRLSCAASGFTFRNYAMHWVRQAPG | |
| | LFcBY-156 | KGLEWVAVISYSGNNKYYASSVKGRFTISRDNSKNTLYLQLNSLRAEDTAVYYCAREFYYDST | |
| | | GYDYSTPGDYWGQGTLVTVSSGGGGSGGGGSGGGGSDIQMTQSPSSLSASVGDRVTITCQASQ | |
| | | DISNYLNWYQQKPGKAPKLLIYDASNLETGVPSRFSGSGSGTDFTFTISSLQPEDIATYYCQQ | |
| | | YDNLPTFGQGTRLEIKSGGGGSEVQLVESGGGLVQPGGSLKLSCAASGFTFNKYAMNWVRQAP | |
| | | GKGLEWVARIRSKYNNYATYYADSVKDRFTISRDDSKNTAYLQMNNLKTEDTAVYYCVRHGNF | |
| | | GNSYISYWAYWGQGTLVTVSSGGGGSGGGGSGGGGSQTVVTQEPSLTVSPGGTVTLTCGSSTG | |
| | | AVTSGNYPNWVQQKPGQAPRGLIGGTKFLAPGTPARFSGSLLGGKAALTLSGVQPEDEAEYYC | |
| | | VLWYSNRWVFGGGTKLTVLGGGGSQRFCIGHFGGLHPCNGGGGGSGGGSRDWDFDVFGGGTPV | |
| | | GGHHHHHH | |
| 232. | CH19_8-F6xI2C6-LFcBY- | QRFVTGHFGGLYPANGGGGGSQVQLVESGGGVVQPGRSLRLSCVASGFTFRNYAMHWVRQAPG | |
| | 156 | KGLEWVAVISYSGNNKYYASSVKGRFTISRDNSKNTLYLQLNSLRAEDTAVYYCAREFYYDST | |
| | | GYDYSTPGDYWGQGTLVTVSSGGGGSGGGGSGGGGSDIQMTQSPSSLSASVGDRVTITCRASQ | |
| | | SISSYLNWYQQKPGKAPKLLIYDASSLQSGVPSRFSGSGSGTEFTLTISSLQAEDVAVYYCQQ | |
| | | YYSTPLIFGGGTKVDIKSGGGGSEVQLVESGGGLVQPGGSLKLSCAASGFTFNKYAMNWVRQA | |
| | | PGKGLEWVARIRSKYNNYATYYADSVKDRFTISRDDSKNTAYLQMNNLKTEDTAVYYCVRHGN | |
| | | FGNSYISYWAYWGQGTLVTVSSGGGGSGGGGSGGGGSQTVVTQEPSLTVSPGGTVTLTCGSST | |
| | | GAVTSGNYPNWVQQKPGQAPRGLIGGTKFLAPGTPARFSGSLLGGKAALTLSGVQPEDEAEYY | |
| | | CVLWYSNRWVFGGGTKLTVLGGGGSQRFCTGHFGGLHPCNGGGGGSGGGSRDWDFDVFGGGTP | |
| | | VGGHHHHHH | |
| 233. | CH19_0-G9xI2C6-LFcBY- | QRFVTGHFGGLYPANGGGGGSQVQLVESGGGVVQPGRSLRLSCAASGFTFRNYAMHWVRQAPG | |
| | 156 | KGLEWVAGISYSGTNKYYASSVKGRFTISRDNSKNTLYLQLNSLRAEDTAVYYCAREFYYDST | |
| | | GYDYSTPGDYWGQGTLVTVSSGGGGSGGGGSGGGGSDIQMTQSPSSLSASVGDRVTITCQASQ | |
| | | DISNYLNWYQQKPGKAPKLLIYDASNLETGVPSRFSGSGSGTEFTLTISSLQPEDIATYYCQQ | |
| | | YDNLPLIFGGGTKVDIKSGGGGSEVQLVESGGGLVQPGGSLKLSCAASGFTFNKYAMNWVRQA | |
| | | PGKGLEWVARIRSKYNNYATYYADSVKDRFTISRDDSKNTAYLQMNNLKTEDTAVYYCVRHGN | |
| | | FGNSYISYWAYWGQGTLVTVSSGGGGSGGGGSGGGGSQTVVTQEPSLIVSPGGIVTLICGSST | |
| | | GAVTSGNYPNWVQQKPGQAPRGLIGGTKFLAPGTPARFSGSLLGGKAALTLSGVQPEDEAEYY | |
| | | CVLWYSNRWVFGGGTKLTVLGGGGSQRFCTGHFGGLHPCNGGGGGSGGGSRDWDFDVFGGGTP | |
| | | VGGHHHHHH | |
| 234. | CH19_1-E11xI2C6-LFcBY- | QRFVTGHFGGLYPANGGGGGSQVQLVESGGGVVQPGRSLRLSCVASGFTFRNYAMHWVRQAPG | |
| | 156 | KGLEWVAVISYSGNNKYYASSVKGRFTISRDNSKNTLFLQLNSLRAEDTAVYYCAREFYYDST | |
| | | GYDYSTPGNYWGQGTLVTVSSGGGGSGGGGSGGGGSDIQMTQSPSSLSASVGDRVTITCQASQ | |
| | | DISNYLNWYQQKPGKAPKLLIYDASNLETGVPSRFSGSGSGTDFIFTISSLQPEDIATYYCQQ | |
| | | YVNLPLTFGGGTKLEIKSGGGGSEVQLVESGGGLVQPGGSLKLSCAASGFTFNKYAMNWVRQA | |
| | | PGKGLEWVARIRSKYNNYATYYADSVKDRFTISRDDSKNTAYLQMNNLKTEDTAVYYCVRHGN | |
| | | FGNSYISYWAYWGQGTLVTVSSGGGGSGGGGSGGGGSQTVVTQEPSLTVSPGGTVTLTCGSST | |
| | | GAVTSGNYPNWVQQKPGQAPRGLIGGTKFLAPGTPARFSGSLLGGKAALTLSGVQPEDEAEYY | |
| | | CVLWYSNRWVFGGGTKLTVLGGGGSQRFCTGHFGGLHPCNGGGGGSGGGSRDWDFDVFGGGTP | |
| | | VGGHHHHHH | |
| 235. | CH19_0-F5xI2C6-LFcBY- | QRFVTGHFGGLYPANGGGGGSQVQLVESGGGVVQPGRSLRLSCAASGFTFSSYGMQWVRQAPG | |
| | 156 | KGLEWVAVIWYSGSNKYYASSVKGRFTISRDNSKNTLYLQMNSLRAEDTAVYYCARDGYPIFY | |
| | | RYYGMDVWGQGTIVIVSSGGGGSGGGGSGGGGSDIQMTQSPSSLSASVGDRVTITCRASQGIS | |
| | | NYLAWYQQKPGKVPKLLIYAASTLQSGVPSRFSGSGSGTDFTLTISSLQPEDVATYYCQKYNS | |
| | | APLTFGGGTKVEIKSGGGGSEVQLVESGGGLVQPGGSLKLSCAASGFTENKYAMNWVRQAPGK | |
| | | GLEWVARIRSKYNNYATYYADSVKDRFTISRDDSKNTAYLQMNNLKTEDTAVYYCVRHGNFGN | |
| | | SYISYWAYWGQGTLVTVSSGGGGSGGGGSGGGGSQTVVTQEPSLTVSPGGTVTLTCGSSTGAV | |
| | | TSGNYPNWVQQKPGQAPRGLIGGTKFLAPGTPARFSGSLLGGKAALTLSGVQPEDEAEYYCVL | |
| | | WYSNRWVFGGGTKLTVLGGGGSQRFCTGHFGGLHPCNGGGGGSGGGSRDWDFDVFGGGTPVGG | |
| | | HHHHHH | |
| 236. | CH19_1-E1xI2C6-LFcBY- | QRFVTGHFGGLYPANGGGGGSQVQLVESGGGVVQPGRSLRLSCAASGFTFSSYGMHWVRQAPG | |
| | 156 | KGLEWVAVISYSGSNKYYASSVKGRFTISRDNSKNTLYLQMNSLRAEDTAVYYCARDGYPIFY | |
| | | RYYGMDVWGQGTIVIVSSGGGGSGGGGSGGGGSEIVLIQSPGILSLSPGERAILSCRASQSVS | |
| | | SSYLAWYQQKPGQAPRLLIYGASSRATGIPDRFSGSGSGTDFTLTISRLEPEDLAVYYCQQYG | |
| | | TSPLTFGGGTKLEIKSGGGGSEVQLVESGGGLVQPGGSLKLSCAASGFTFNKYAMNWVRQAPG | |
| | | KGLEWVARIRSKYNNYATYYADSVKDRFTISRDDSKNTAYLQMNNLKTEDTAVYYCVRHGNFG | |
| | | NSYISYWAYWGQGTLVTVSSGGGGSGGGGSGGGGSQTVVTQEPSLTVSPGGTVTLTCGSSTGA | |
| | | VTSGNYPNWVQQKPGQAPRGLIGGTKFLAPGTPARFSGSLLGGKAALTLSGVQPEDEAEYYCV | |
| | | LWYSNRWVEGGGIKLTVLGGGGSQRFCTGHFGGLHPCNGGGGGSGGGSRDWDFDVFGGGTPVG | |
| | | GHHHHHH | |
| 237. | CH19_1-E6xI2C6-LFcBY- | QRFVTGHFGGLYPANGGGGGSQVQLVESGGGVVQPGRSLRLSCAASGFTFSSFGMHWVRQAPG | |
| | 156 | KGLEWVAFIWYSGSNKYYASSVKGRVTISRDNSKNTLYLQMNSLRAEDTAVYYCARDGYPIFY | |
| | | YYYGMDVWGQGTIVIVSSGGGGSGGGGSGGGGSEIVLIQSPGILSLSPGERAILSCRASQSVS | |
| | | SSYLAWYQQKPGQAPRLLIYGASSRATGIPDRFSGSGSGTDFTLTISRLEPEDFAVYYCQQYG | |
| | | SSPFTFGPGTRLEIKSGGGGSEVQLVESGGGLVQPGGSLKLSCAASGFTFNKYAMNWVRQAPG | |
| | | KGLEWVARIRSKYNNYATYYADSVKDRFTISRDDSKNTAYLQMNNLKTEDTAVYYCVRHGNFG | |
| | | NSYISYWAYWGQGTLVTVSSGGGGSGGGGSGGGGSQTVVTQEPSLTVSPGGTVTLTCGSSTGA | |
| | | VTSGNYPNWVQQKPGQAPRGLIGGTKFLAPGTPARFSGSLLGGKAALTLSGVQPEDEAEYYCV | |
| | | LWYSNRWVFGGGTKLTVLGGGGSQRFCTGHFGGLHPCNGGGGGSGGGSRDWDFDVFGGGTPVG | |
| | | GHHHHHH | |
| 238. | CH19_2G6_302_VKGxI2C6- | QRFVTGHFGGLHPANGGGGGSQVQLVESGGGVVQPGGSLRLSCAASGFTFSSYGMHWVRQAPG | |
| | LH-FcB-CH | KGLEWVAFIWYDGSNKYYADSVKGRFTISRDNSKNTLYLQMNSLRAEDTAVYYCARRAGIIGT | |
| | | IGYYYGMDVWGQGTTVTVSSGGGGSGGGGSGGGGSSYELTQPPSVSVSPGQTASITCSGDRLG | |
| | | EKYTSWYQQRPGQSPLLVIYQDTKRPSGIPERFSGSNSGNTATLTISGTQAMDEADYYCQAWE | |
| | | SSTVVFGGGTKLIVLSGGGGSEVQLVESGGGLVQPGGSLKLSCAASGFTENKYAMNWVRQAPG | |
| | | KGLEWVARIRSKYNNYATYYADSVKDRFTISRDDSKNTAYLQMNNLKTEDTAVYYCVRHGNFG | |
| | | NSYISYWAYWGQGTLVTVSSGGGGSGGGGSGGGGSQTVVTQEPSLTVSPGGTVTLTCGSSTGA | |
| | | VTSGNYPNWVQQKPGQAPRGLIGGTKFLAPGTPARFSGSLLGGKAALTLSGVQPEDEAEYYCV | |
| | | LWYSNRWVFGGGTKLTVLGGGGSQRFCTGHFGGLHPCNGHHHHHH | |
| 239. | CH19_0-E11xI2C6-LH- | QRFVTGHFGGLHPANGGGGGSQVQLQESGPGLVKPSQTLSLTCTVSGGSISRGGYYWSWIRQH | |
| | FcB-CH | PGKGLEWIGYIFYRGRTYYNPSLKSRVTISVDTSKNQFSLKLSSVTAADTAVYYCARVNSNYG | |
| | | WFDPWGQGTLVTVSSGGGGSGGGGSGGGGSEIVLTQFPGTLSLSPGERATLSCRASQSVSSSY | |
| | | LAWYQQKPGQAPRLLIYGASSRATGIPDRFSGSGSGIDFILTISRLEPEDFAVYYCQQYGSSP | |
| | | LTFGGGTKLEIKSGGGGSEVQLVESGGGLVQPGGSLKLSCAASGFTFNKYAMNWVRQAPGKGL | |
| | | EWVARIRSKYNNYATYYADSVKDRFTISRDDSKNTAYLQMNNLKTEDTAVYYCVRHGNFGNSY | |
| | | ISYWAYWGQGTLVTVSSGGGGSGGGGSGGGGSQTVVIQEPSLIVSPGGIVTLICGSSTGAVTS | |
| | | GNYPNWVQQKPGQAPRGLIGGTKFLAPGTPARFSGSLLGGKAALTLSGVQPEDEAEYYCVLWY | |
| | | SNRWVFGGGTKLTVLGGGGSQRFCTGHFGGLHPCNGHHHHHH | |
| 240. | CH19_5-G4xI2C6-LH-FcB- | QRFVIGHFGGLHPANGGGGGSQVQLQESGPGLVKPSQTLSLICTVSGGSISSGGYYWSWIRQH | |
| | CH | PGKGLEWIGYIFYRGRTYYNPSLKSRVTISVDTSKNQFSLKLSSVTAADTAVYYCARVYSNYG | |
| | | WFDPWGQGTLVTVSSGGGGSGGGGSGGGGSEIVLTQSPGTLSLSPGERATLSCRASQSVSSSY | |
| | | LAWYQQKPGQAPRLLIYGTSNRATGIPDRFSGSGSGTDFTLTISRLEPEDFAVYYCQQYGSSP | |
| | | LTFGGGTKLEIKSGGGGSEVQLVESGGGLVQPGGSLKLSCAASGFTFNKYAMNWVRQAPGKGL | |
| | | EWVARIRSKYNNYATYYADSVKDRFTISRDDSKNTAYLQMNNLKTEDTAVYYCVRHGNFGNSY | |
| | | ISYWAYWGQGTLVTVSSGGGGSGGGGSGGGGSQTVVTQEPSLTVSPGGTVTLTCGSSTGAVTS | |
| | | GNYPNWVQQKPGQAPRGLIGGTKFLAPGTPARFSGSLLGGKAALTLSGVQPEDEAEYYCVLWY | |
| | | SNRWVFGGGTKLTVLGGGGSQRFCTGHFGGLHPCNGHHHHHH | |
| 241. | CH19_8-H6xI2C6-LH-FcB- | QRFVTGHFGGLHPANGGGGGSQVQLQESGPGLVKPSQTLSLTCTVSGGSISSGGYYWSWIRQH | |
| | CH | PGKGLEWIGYIFYSGRTYYNPSLKSRVTISVDTSKNQFSLKLSSVTAADTAVYYCARVYSNYG | |
| | | WFDPWGQGTLVTVSSGGGGSGGGGSGGGGSEIVLIQSPGILSLSPGERATLSCRASQSVSSSY | |
| | | LAWYQQKPGQAPRLLIYGASSRATGIPDRFSGSGSGTDFTLTISRLEPEDFAVYYCQQYGSSP | |
| | | LTFGGGTKLEIKSGGGGSEVQLVESGGGLVQPGGSLKLSCAASGFTFNKYAMNWVRQAPGKGL | |
| | | EWVARIRSKYNNYATYYADSVKDRFTISRDDSKNTAYLQMNNLKTEDTAVYYCVRHGNFGNSY | |
| | | ISYWAYWGQGTLVTVSSGGGGSGGGGSGGGGSQTVVTQEPSLTVSPGGTVTLTCGSSTGAVTS | |
| | | GNYPNWVQQKPGQAPRGLIGGTKFLAPGTPARFSGSLLGGKAALTLSGVQPEDEAEYYCVLWY | |
| | | SNRWVFGGGTKLTVLGGGGSQRFCTGHFGGLHPCNGHHHHHH | |
| 242. | CH19_2-C11xI2C6-LH- | QRFVTGHFGGLHPANGGGGGSQVQLQESGPGLVKPSQTLSLTCTVSGGSISSGGYYWSWIRQH | |
| | FcB-CH | PGKGLEWIGYIFYSGRTYYNPSLKSRVTISVDTSKNQFSLKLRSVTAADTAVYYCARVYSNYG | |
| | | WFDPWGQGTLVTVSSGGGGSGGGGSGGGGSEIVLIQSPGILSLSPGERATLSCRASQSVSSSY | |
| | | LAWYQQKPGQAPRLLIYGASSRATGIPDRFSGSGSGTDFTLTISRLEPEDFAVYYCQQYGSSP | |
| | | LTFGGGTKLEIKSGGGGSEVQLVESGGGLVQPGGSLKLSCAASGFTFNKYAMNWVRQAPGKGL | |
| | | EWVARIRSKYNNYATYYADSVKDRFTISRDDSKNTAYLQMNNLKTEDTAVYYCVRHGNFGNSY | |
| | | ISYWAYWGQGTLVTVSSGGGGSGGGGSGGGGSQTVVTQEPSLTVSPGGTVTLTCGSSTGAVTS | |
| | | GNYPNWVQQKPGQAPRGLIGGTKFLAPGTPARFSGSLLGGKAALTLSGVQPEDEAEYYCVLWY | |
| | | SNRWVFGGGTKLTVLGGGGSQRFCTGHFGGLHPCNGHHHHHH | |
| 243. | CH19_2-A10xI2C6-LH- | QRFVTGHFGGLHPANGGGGGSQVQLQESGPGLVKPSQTLSLTCTVSGGSISSGGYYWSWIRQH | |
| | FcB-CH | PGKGLEWIGYIYYSGSTFYNPSLRSRVTISVDTSKNQFSLKLSSVTAADTAVYYCARDSSSSR | |
| | | ALDYWGQGTLVTVSSGGGGSGGGGSGGGGSEIVLIQSPGILSLSPGERATLSCRASQSVSSSY | |
| | | LAWYQQKPGQAPRLLIYGASSRATGIPDRFSGSGSGIDFILTISRLEPEDFAVYYCQQYDSSP | |
| | | RTFGQGTKLEIKSGGGGSEVQLVESGGGLVQPGGSLKLSCAASGFTFNKYAMNWVRQAPGKGL | |
| | | EWVARIRSKYNNYATYYADSVKDRFTISRDDSKNTAYLQMNNLKTEDTAVYYCVRHGNFGNSY | |
| | | ISYWAYWGQGTLVTVSSGGGGSGGGGSGGGGSQTVVTQEPSLTVSPGGTVTLTCGSSTGAVTS | |
| | | GNYPNWVQQKPGQAPRGLIGGTKFLAPGTPARFSGSLLGGKAALTLSGVQPEDEAEYYCVLWY | |
| | | SNRWVFGGGTKLTVLGGGGSQRFCTGHFGGLHPCNGHHHHHH | |
| 244. | CH19_1-D11xI2C6-LH- | QRFVTGHFGGLHPANGGGGGSQVQLQESGPGLVKPSQTLSLTCTVSGGSISSGGYYWSWIRQH | |
| | FcB-CH | PGKGLEWIGYIYYRGRTYYNPSLKSRVTISVDTSKNQFSLKLSSVTAADTAVYYCARVYSNYG | |
| | | WFDPWGQGTLVTVSSGGGGSGGGGSGGGGSEIVLIQSPGILSLSPGERATLSCRASQSVSSSY | |
| | | LAWYQQKPGQAPRLLIYGASSRATGIPDRFSGSGSGTDFTLTISRLEPEDFAVYYCQQYGSSP | |
| | | LTFGGGTKLEIKSGGGGSEVQLVESGGGLVQPGGSLKLSCAASGFTFNKYAMNWVRQAPGKGL | |
| | | EWVARIRSKYNNYATYYADSVKDRFTISRDDSKNTAYLQMNNLKTEDTAVYYCVRHGNFGNSY | |
| | | ISYWAYWGQGTLVTVSSGGGGSGGGGSGGGGSQTVVIQEPSLIVSPGGIVTLICGSSTGAVIS | |
| | | GNYPNWVQQKPGQAPRGLIGGTKFLAPGTPARFSGSLLGGKAALTLSGVQPEDEAEYYCVLWY | |
| | | SNRWVFGGGTKLIVLGGGGSQRFCIGHFGGLHPCNGHHHHHH | |
| | | QRFVTGHFGGLHPANGGGGGSQVQLQESGPGLVKPSETLSLTCTVSGGSISSGGYYWSWIRQH | |
| 245. | CH19_9-F9xI2C6-LH-FcB- | PGKGLEWIGYIFYRGRTYYNPSLKSRVTISVDTSKNQFSLKLSSVTAADTAVYYCARVYSNYG | |
| | CH | WFDPWGQGTLVTVSSGGGGSGGGGSGGGGSEIVLIQSPGILSLSPGERATLSCRASQSVSSSY | |
| | | LAWYQQKPGQAPRLLIYGASSRATGIPDRFSGSGSGTDFTLTISRLEPEDFAVYYCQQYGSSP | |
| | | TFGGGTKVEIKSGGGGSEVQLVESGGGLVQPGGSLKLSCAASGFIFNKYAMNWVRQAPGKGLE | |
| | | WVARIRSKYNNYATYYADSVKDRFTISRDDSKNTAYLQMNNLKTEDTAVYYCVRHGNFGNSYI | |
| | | SYWAYWGQGTLVTVSSGGGGSGGGGSGGGGSQTVVTQEPSLTVSPGGTVTLTCGSSTGAVTSG | |
| | | NYPNWVQQKPGQAPRGLIGGTKFLAPGTPARFSGSLLGGKAALTLSGVQPEDEAEYYCVLWYS | |
| | | NRWVFGGGTKLTVLGGGGSQRFCTGHFGGLHPCNGHHHHHH | |
| 246. | CH19_1-H8xI2C6-LH-FcB- | QRFVTGHFGGLHPANGGGGGSQVQLQESGPGLVKPSQTLSLTCTVSGGSISSGGYYWSWIRQH | |
| | CH | PGKGLEWIGYIFYRGRTYYNPSLKSRVTISVDTSKNQFSLKLSSVTAADTAVYYCARVYSNYG | |
| | | WFDPWGQGTLVTVSSGGGGSGGGGSGGGGSEIVLIQSPGILSLSPGERATLSCRASQSVSSSY | |
| | | LAWYQQKPGQAPRLLIYGASSRATGIPDRFSGSGSGTDFTLTISRLEPEDFAVYYCQQYGSSP | |
| | | LTFGGGTKVEIKSGGGGSEVQLVESGGGLVQPGGSLKLSCAASGFTFNKYAMNWVRQAPGKGL | |
| | | EWVARIRSKYNNYATYYADSVKDRFTISRDDSKNTAYLQMNNLKTEDTAVYYCVRHGNFGNSY | |
| | | ISYWAYWGQGTLVTVSSGGGGSGGGGSGGGGSQTVVTQEPSLTVSPGGTVTLTCGSSTGAVTS | |
| | | GNYPNWVQQKPGQAPRGLIGGTKFLAPGTPARFSGSLLGGKAALTLSGVQPEDEAEYYCVLWY | |
| | | SNRWVFGGGTKLTVLGGGGSQRFCTGHFGGLHPCNGHHHHHH | |
| 247. | CH19_1-B12xI2C6-LH- | QRFVTGHFGGLHPANGGGGGSQVQLQESGPGLVKPSQTLSLTCTVSGGSISSGGYYWSWIRQH | |
| | FcB-CH | PGKGLEWIGYIYYRGRTYYNPSLKSRVTISVDTSKNQFSLKLSSVTAADTAVYYCARVYSNYG | |
| | | WFDPWGQGTLVTVSSGGGGSGGGGSGGGGSEIVLIQSPGILSLSPGERATLSCRASQSVSSSY | |
| | | LAWYQQKPGQAPRLLIYGASSRATGIPDRFSGSGSGTDFTLTISRLEPEDFAVYYCQQYGSSP | |
| | | TFGPGTKVEIKSGGGGSEVQLVESGGGLVQPGGSLKLSCAASGFTFNKYAMNWVRQAPGKGLE | |
| | | WVARIRSKYNNYATYYADSVKDRFTISRDDSKNTAYLQMNNLKTEDTAVYYCVRHGNFGNSYI | |
| | | SYWAYWGQGTLVTVSSGGGGSGGGGSGGGGSQTVVTQEPSLTVSPGGTVTLTCGSSTGAVTSG | |
| | | NYPNWVQQKPGQAPRGLIGGIKFLAPGTPARFSGSLLGGKAALTLSGVQPEDEAEYYCVLWYS | |
| | | NRWVFGGGTKLTVLGGGGSQRFCTGHFGGLHPCNGHHHHHH | |
| 248. | CH19_0-C4xI2C6-LH-FcB- | QRFVTGHFGGLHPANGGGGGSQVQLQESGPGLVKPSQTLSLTCTVSGGSISSGGYYWSWIRQH | |
| | CH | PGKGLEWIGYIYYRGRTYYNPSLKSRVTISVDTSKNQFSLKLSSVTAADTAVYYCARVYSNYG | |
| | | WFDPWGQGTLVTVSSGGGGSGGGGSGGGGSEIVLIQSPGILSLSPGERATLSCRASQSVSSSY | |
| | | LAWYQQKPGQAPRLLIYGASSRATGIPDRFSGSGSGIDFILTISRLEPEDFAVYYCQQYGSSP | |
| | | TFGGGTKVEIKSGGGGSEVQLVESGGGLVQPGGSLKLSCAASGFTFNKYAMNWVRQAPGKGLE | |
| | | WVARIRSKYNNYATYYADSVKDRFTISRDDSKNTAYLQMNNLKTEDTAVYYCVRHGNFGNSYI | |
| | | SYWAYWGQGTLVTVSSGGGGSGGGGSGGGGSQTVVTQEPSLTVSPGGTVTLTCGSSTGAVTSG | |
| | | NYPNWVQQKPGQAPRGLIGGTKFLAPGTPARFSGSLLGGKAALTLSGVQPEDEAEYYCVLWYS | |
| | | NRWVFGGGTKLTVLGGGGSQRFCTGHFGGLHPCNGHHHHHH | |
| 249. | CH19_3-F2xI2C6-LH-FcB- | QRFVTGHFGGLHPANGGGGGSQVQLQESGPGLVKPSQTLSLTCTISGGSISSGGYYWSWIRQH | |
| | CH | PGKGLEWIGYIFYSGRTYYNPSLKSRVTISVDTSKNQFSLKLTSVTAADTAVYYCARVNSNYG | |
| | | WFDPWGQGTLVTVSSGGGGSGGGGSGGGGSEIVLIQSPGILSLSPGERATLSCRASQSVSSSY | |
| | | LAWYQQKPGQAPRLLIYGASSRATGIPDRFSGSGSGIDFILTISRLEPEDFAVYYCQQYGSSP | |
| | | TFGGGTKVEIKSGGGGSEVQLVESGGGLVQPGGSLKLSCAASGFTFNKYAMNWVRQAPGKGLE | |
| | | WVARIRSKYNNYATYYADSVKDRFTISRDDSKNTAYLQMNNLKTEDTAVYYCVRHGNFGNSYI | |
| | | SYWAYWGQGTLVTVSSGGGGSGGGGSGGGGSQTVVTQEPSLTVSPGGTVTLTCGSSTGAVTSG | |
| | | NYPNWVQQKPGQAPRGLIGGTKFLAPGTPARFSGSLLGGKAALTLSGVQPEDEAEYYCVLWYS | |
| | | NRWVFGGGTKLTVLGGGGSQRFCTGHFGGLHPCNGHHHHHH | |
| 250. | CH19_3-B10xI2C6-LH- | QRFVTGHFGGLHPANGGGGGSQVQLQESGPGLVKPSQTLSLTCTVSGGSISSGGYYWSWIRQH | |
| | FcB-CH | PGKGLDWIGYIFYRGRTYYNPSLKSRVTISVDTSKNQFSLKLSSVTAADTAVYYCARVNSNYG | |
| | | WFDPWGQGTLVTVSSGGGGSGGGGSGGGGSEIVLTQSPGTLSLSPGERATLSCRASQSVSSSY | |
| | | LAWYQQKPGQAPRLLIYGASSRATGIPDRFSGSGSGIDFILTISRLEPEDFAVYYCQQYGSSP | |
| | | LTFGGGTKVEIKSGGGGSEVQLVESGGGLVQPGGSLKLSCAASGFTFNKYAMNWVRQAPGKGL | |
| | | EWVARIRSKYNNYATYYADSVKDRFTISRDDSKNTAYLQMNNLKTEDTAVYYCVRHGNFGNSY | |
| | | ISYWAYWGQGTLVTVSSGGGGSGGGGSGGGGSQTVVIQEPSLIVSPGGIVTLICGSSTGAVIS | |
| | | GNYPNWVQQKPGQAPRGLIGGTKFLAPGTPARFSGSLLGGKAALTLSGVQPEDEAEYYCVLWY | |
| | | SNRWVFGGGTKLTVLGGGGSQRFCTGHFGGLHPCNGHHHHHH | |
| 251. | CH19_0-G4xI2C6-LH-FcB- | QRFVIGHFGGLHPANGGGGGSQVQLQESGPGLVKPSQTLSLICTVSGGSISSGGYYWSWIRQH | |
| | CH | PGKGLEWIGYIYYRGRTYYNPSLKSRVTISVDTSKNQFSLKLSSVTAADTAVYYCARVYSNYG | |
| | | WFDPWGQGTLVTVSSGGGGSGGGGSGGGGSEIVLIQSPGILSLSPGERATLSCRASQSVSSSY | |
| | | LAWYQQKPGQAPRLLIYGASTRATGIPDRFSGSGSGTDFTLTISRLEPEDFAVYYCQQYGSSP | |
| | | SFGQGTKVEIKSGGGGSEVQLVESGGGLVQPGGSLKLSCAASGFIFNKYAMNWVRQAPGKGLE | |
| | | WVARIRSKYNNYATYYADSVKDRFTISRDDSKNTAYLQMNNLKTEDTAVYYCVRHGNFGNSYI | |
| | | SYWAYWGQGTLVTVSSGGGGSGGGGSGGGGSQTVVTQEPSLTVSPGGTVTLTCGSSTGAVTSG | |
| | | NYPNWVQQKPGQAPRGLIGGTKFLAPGTPARFSGSLLGGKAALTLSGVQPEDEAEYYCVLWYS | |
| | | NRWVFGGGTKLTVLGGGGSQRFCTGHFGGLHPCNGHHHHHH | |
| 252. | CH19_0-H5xI2C6-LH-FcB- | QRFVTGHFGGLHPANGGGGGSQVQLQESGPGLVRPSQTLSLTCTVSGGSISSGGYYWSWIRQH | |
| | CH | PGKGLEWIGYIYYRGRTYYNPSLKSRVTISVDTSKNQFSLKLSSVTAADTAVYYCARVYSNYG | |
| | | WFDPWGQGTLVTVSSGGGGSGGGGSGGGGSEIVLTQSPGTLSLSPGERATLSCRASQSVSSSY | |
| | | LAWYQQKPGQAPRLLIYGASSRATGIPDRFSGSGSGTDFTLTISRLEPEDFAVYYCQQYDTSP | |
| | | LTFGGGTKVEIKSGGGGSEVQLVESGGGLVQPGGSLKLSCAASGFTFNKYAMNWVRQAPGKGL | |
| | | EWVARIRSKYNNYATYYADSVKDRFTISRDDSKNTAYLQMNNLKTEDTAVYYCVRHGNFGNSY | |
| | | ISYWAYWGQGTLVTVSSGGGGSGGGGSGGGGSQTVVTQEPSLTVSPGGTVTLTCGSSTGAVTS | |
| | | GNYPNWVQQKPGQAPRGLIGGTKFLAPGTPARFSGSLLGGKAALTLSGVQPEDEAEYYCVLWY | |
| | | SNRWVFGGGTKLTVLGGGGSQRFCTGHFGGLHPCNGHHHHHH | |
| 253. | CH19_0-B8xI2C6-LH-FcB- | QRFVTGHFGGLHPANGGGGGSQVQLQESGPGLVKPSQTLSLTCTVSGGSISSGGYYWSWIRQH | |
| | CH | PGKGLEWIGYIYYRGRTYYNPSLKSRVTISVDTSKNQFSLKLSSVTAADTAVYYCARVYSNYG | |
| | | WFDPWGQGTLVTVSSGGGGSGGGGSGGGGSEIVLTQSPGTLSLSPGERATLSCRASQSVSSSY | |
| | | LAWYQQKPGQAPRLLIYGASSRATGIPDRFSGSGSGTDFTLTISRLEPEDFAVYYCQQYGSSP | |
| | | TFGGGTKVEIKSGGGGSEVQLVESGGGLVQPGGSLKLSCAASGFTFNKYAMNWVRQAPGKGLE | |
| | | WVARIRSKYNNYATYYADSVKDRFTISRDDSKNTAYLQMNNLKTEDTAVYYCVRHGNFGNSYI | |
| | | SYWAYWGQGTLVTVSSGGGGSGGGGSGGGGSQTVVTQEPSLTVSPGGTVTLTCGSSTGAVTSG | |
| | | NYPNWVQQKPGQAPRGLIGGTKFLAPGTPARFSGSLLGGKAALTLSGVQPEDEAEYYCVLWYS | |
| | | NRWVFGGGTKLTVLGGGGSQRFCTGHFGGLHPCNGHHHHHH | |
| 254. | CH19_2-D9xI2C6-LH-FcB- | QRFVTGHFGGLHPANGGGGGSQVQLQESGPGLVKPSQTLSLTCTVSGGSISSGGYYWSWIRQH | |
| | CH | PGKGLEWIGYIYYRGRTYYNPSLKSRVTISVDTSKNQFSLKLSSVTAADTAVYYCARVYSNYG | |
| | | WFDPWGQGTLVTVSSGGGGSGGGGSGGGGSEIVLTQSPGTLSLSPGERATLSCRASQSVSSSY | |
| | | LAWYQQKPGQAPRLLIYGASSRATGIPDRFSGSGSGIDFILTISRLEPEDFAVYYCQQYGSSP | |
| | | LTFGGGTKVEIKSGGGGSEVQLVESGGGLVQPGGSLKLSCAASGFTFNKYAMNWVRQAPGKGL | |
| | | EWVARIRSKYNNYATYYADSVKDRFTISRDDSKNTAYLQMNNLKTEDTAVYYCVRHGNFGNSY | |
| | | ISYWAYWGQGTLVTVSSGGGGSGGGGSGGGGSQTVVTQEPSLTVSPGGTVTLTCGSSTGAVTS | |
| | | GNYPNWVQQKPGQAPRGLIGGTKFLAPGTPARFSGSLLGGKAALTLSGVQPEDEAEYYCVLWY | |
| | | SNRWVFGGGTKLTVLGGGGSQRFCTGHFGGLHPCNGHHHHHH | |
| 255. | CH19_8-H7xI2C6-LH-FcB- | QRFVTGHFGGLHPANGGGGGSQVQLQESGPGLVKPSQTLSLTCTVSGGSISSGGYYWSWVRQH | |
| | CH | PGKGLEWIGYIFYSGRTYYNPSLKSRVIISVDTSKNQFSLKLSSVTAADTAVYYCARVYSNYG | |
| | | WFDPWGQGTLVTVSSGGGGSGGGGSGGGGSEIVLTQSPGTLSLSPGERATLSCRASQSVSSSY | |
| | | LAWYQQKPGQAPRLLIYGASSRATGIPDRFSGSGSGTDFTLTISRLEPEDFAVYYCQQYGSSP | |
| | | LTFGGGTKVEIKSGGGGSEVQLVESGGGLVQPGGSLKLSCAASGFTFNKYAMNWVRQAPGKGL | |
| | | EWVARIRSKYNNYATYYADSVKDRFTISRDDSKNTAYLQMNNLKTEDTAVYYCVRHGNFGNSY | |
| | | ISYWAYWGQGTLVTVSSGGGGSGGGGSGGGGSQTVVIQEPSLIVSPGGIVTLICGSSTGAVIS | |
| | | GNYPNWVQQKPGQAPRGLIGGTKFLAPGTPARFSGSLLGGKAALTLSGVQPEDEAEYYCVLWY | |
| | | SNRWVFGGGTKLTVLGGGGSQRFCTGHFGGLHPCNGHHHHHH | |
| 256. | CH19_9-C2xI2C6-LH-FcB- | QRFVTGHFGGLHPANGGGGGSQVQLQESGPGLVKPSQTLSLTCTVSGGSISSGGYYWSWIRQH | |
| | CH | PGKGLEWIGYIFYSGRTYYNPSLKSRVTISVDTSKNQFSLKLSSVTAADTAVYYCARVYSNYG | |
| | | WFDPWGQGTLVTVSSGGGGSGGGGSGGGGSEIVLIQSPGILSLSPGERATLSCRASQSVSSSY | |
| | | LAWYQQKPGQAPRLLIYGASSRATGIPDRFSGSGSGTDFTLTISRLEPEDFAVYYCQQYGSSP | |
| | | LTFGGGTKVEIKSGGGGSEVQLVESGGGLVQPGGSLKLSCAASGFTFNKYAMNWVRQAPGKGL | |
| | | EWVARIRSKYNNYATYYADSVKDRFTISRDDSKNTAYLQMNNLKTEDTAVYYCVRHGNFGNSY | |
| | | ISYWAYWGQGTLVTVSSGGGGSGGGGSGGGGSQTVVIQEPSLIVSPGGIVTLICGSSTGAVIS | |
| | | GNYPNWVQQKPGQAPRGLIGGTKFLAPGTPARFSGSLLGGKAALTLSGVQPEDEAEYYCVLWY | |
| | | SNRWVFGGGTKLIVLGGGGSQRFCIGHFGGLHPCNGHHHHHH | |
| 257. | CH19_3-D5xI2C6-LH-FcB- | QRFVTGHFGGLHPANGGGGGSQVQLQESGPGLVKPSQTLSLTCTVSGGSISSGGYYWSWIRQH | |
| | CH | PGKGLEWIGYIFYSGRTYYNPSLKSRVSISVDTSKNQFSLKLSSVTAADTAVYYCARVYSNYG | |
| | | WFDPWGQGTLVTVSSGGGGSGGGGSGGGGSEIVLIQSPGILSLSPGERATLSCRASQSVSSSY | |
| | | LAWYQQKPGQAPRLLIYGASSRATGIPDRFSGSGSGTDFTLTISRLEPEDFAVYYCQQYGSSP | |
| | | LTFGGGTKVEIKSGGGGSEVQLVESGGGLVQPGGSLKLSCAASGFTFNKYAMNWVRQAPGKGL | |
| | | EWVARIRSKYNNYATYYADSVKDRFTISRDDSKNTAYLQMNNLKTEDTAVYYCVRHGNFGNSY | |
| | | ISYWAYWGQGTLVTVSSGGGGSGGGGSGGGGSQTVVTQEPSLTVSPGGTVTLTCGSSTGAVTS | |
| | | GNYPNWVQQKPGQAPRGLIGGTKFLAPGTPARFSGSLLGGKAALTLSGVQPEDEAEYYCVLWY | |
| | | SNRWVFGGGTKLTVLGGGGSQRFCTGHFGGLHPCNGHHHHHH | |
| 258. | CH19_1-G11xI2C6-LH- | QRFVTGHFGGLHPANGGGGGSQVQLQESGPGLVKPSETLSLTCTVSGGSVSSGGYYWSWIRQP | |
| | FcB-CH | PGKGLEWIGYIYYRGRTYYNPSLKSRVTISVDTSKNQFSLKLSSVTAADTAVYYCARVYSNYG | |
| | | WFDPWGQGTLVTVSSGGGGSGGGGSGGGGSEIVLIQSPGILSLSPGERATLSCRASQSVSSSY | |
| | | LAWYQQKPGQAPRLLIYGASSRATGIPDRFSGSGSGTDFTLTISRLEPEDFAVYYCQQYGSSP | |
| | | LTFGGGTKVEIKSGGGGSEVQLVESGGGLVQPGGSLKLSCAASGFTFNKYAMNWVRQAPGKGL | |
| | | EWVARIRSKYNNYATYYADSVKDRFTISRDDSKNTAYLQMNNLKTEDTAVYYCVRHGNFGNSY | |
| | | ISYWAYWGQGTLVTVSSGGGGSGGGGSGGGGSQTVVTQEPSLTVSPGGTVTLTCGSSTGAVTS | |
| | | GNYPNWVQQKPGQAPRGLIGGTKFLAPGTPARFSGSLLGGKAALTLSGVQPEDEAEYYCVLWY | |
| | | SNRWVFGGGTKLIVLGGGGSQRFCIGHFGGLHPCNGHHHHHH | |
| 259. | CH19_1-H11xI2C6-LH- | QRFVTGHFGGLHPANGGGGGSQVQLQESGPGLVKPSQTLSLTCTVSGGSISSGGYYWSWIRQH | |
| | FcB-CH | PGKGLEWIGYIYYRGRTYYNPSLKSRVTISVDTSKNQFSLKLSSVTAADTAVYYCARVYSNYG | |
| | | WFDPWGQGTLVTVSSGGGGSGGGGSGGGGSEIVLIQSPGILSLSPGERATLSCRASQSVSSSY | |
| | | LAWYQQKPGQAPRLLIYGASSRATGIPDRFSGSGSGIDFILTISRLEPEDFAVYYCQQYGSSP | |
| | | TFGQGTRLEIKSGGGGSEVQLVESGGGLVQPGGSLKLSCAASGFTFNKYAMNWVRQAPGKGLE | |
| | | WVARIRSKYNNYATYYADSVKDRFTISRDDSKNTAYLQMNNLKTEDTAVYYCVRHGNFGNSYI | |
| | | SYWAYWGQGTLVTVSSGGGGSGGGGSGGGGSQTVVTQEPSLTVSPGGTVTLTCGSSTGAVTSG | |
| | | NYPNWVQQKPGQAPRGLIGGTKFLAPGTPARFSGSLLGGKAALTLSGVQPEDEAEYYCVLWYS | |
| | | NRWVFGGGTKLTVLGGGGSQRFCTGHFGGLHPCNGHHHHHH | |
| 260. | CH19_9-F3xI2C6-LH-FcB- | QRFVTGHFGGLHPANGGGGGSQVQLQESGPGLVKPSQTLSLTCTVSGGSISSGGYYWSWIRQH | |
| | CH | PGKGLEWIGYIFYSGKTYYNPSLKSRVSISVDTSKNQFSLKLSSVTAADTAVYYCARVYSNYG | |
| | | WFDPWGQGTLVTVSSGGGGSGGGGSGGGGSEIVLIQSPGILSLSPGERATLSCRASQSVSSSY | |
| | | LAWYQQKPGQAPRLLIYGASSRATGIPDRFSGSGSGIDFILTISRLEPEDFAVYYCQQYGSSP | |
| | | ITFGQGTRLEIKSGGGGSEVQLVESGGGLVQPGGSLKLSCAASGFTFNKYAMNWVRQAPGKGL | |
| | | EWVARIRSKYNNYATYYADSVKDRFTISRDDSKNTAYLQMNNLKTEDTAVYYCVRHGNFGNSY | |
| | | ISYWAYWGQGTLVTVSSGGGGSGGGGSGGGGSQTVVTQEPSLTVSPGGTVTLTCGSSTGAVTS | |
| | | GNYPNWVQQKPGQAPRGLIGGTKFLAPGTPARFSGSLLGGKAALTLSGVQPEDEAEYYCVLWY | |
| | | SNRWVFGGGTKLTVLGGGGSQRFCTGHFGGLHPCNGHHHHHH | |
| 261. | CH19_2-G6xI2C6-LH-FcB- | QRFVIGHFGGLHPANGGGGGSQVQLQESGPGLVKPSETLSLICTVSGGSISSYYWSWIRQPPG | |
| | CH | KGLEWIGYIYYSGSTNYNPSLKSRVTMSIDTSKNQFSLKLISVTAADTAVYYCARDQRRIVAA | |
| | | GGYYYGMDVWGQGTTVTVSSGGGGSGGGGSGGGGSEIVLTQSPGILSLSPGERATLSCRASQS | |
| | | VSSSYLAWYQQKPGQAPRLLIYGASTRATGIPARFSGSGSGTDFTLTISRLEPEDFAVYYCQQ | |
| | | YGSSPFTFGPGTKVDIKSGGGGSEVQLVESGGGLVQPGGSLKLSCAASGFTFNKYAMNWVRQA | |
| | | PGKGLEWVARIRSKYNNYATYYADSVKDRFTISRDDSKNTAYLQMNNLKTEDTAVYYCVRHGN | |
| | | FGNSYISYWAYWGQGTLVTVSSGGGGSGGGGSGGGGSQTVVTQEPSLIVSPGGIVTLICGSST | |
| | | GAVTSGNYPNWVQQKPGQAPRGLIGGTKFLAPGTPARFSGSLLGGKAALTLSGVQPEDEAEYY | |
| | | CVLWYSNRWVFGGGTKLTVLGGGGSQRFCTGHFGGLHPCNGHHHHHH | |
| 262. | CH19_2-H7xI2C6-LH-FcB- | QRFVIGHFGGLHPANGGGGGSQVQLQESGPGLVKPSQTLSLICTVSGGSISSNDYYWSWIRQH | |
| | CH | PGKGLEWIGYIYYSGSTFYNPSLKSRGAISVDTSKNQFSLKLTSVTAADTAVYYCARGVYRIG | |
| | | AFDIWGQGTMVTVSSGGGGSGGGGSGGGGSDIQMTQSPSSLSASVGDRVTITCRASQSISSYL | |
| | | NWYQQKPGKAPKSLIYAASSLQSGVPSKFSGSGSGTDFTLTISSLQPEDIATYYCQQSYSTPQ | |
| | | AFGGGTKVDIKSGGGGSEVQLVESGGGLVQPGGSLKLSCAASGFTFNKYAMNWVRQAPGKGLE | |
| | | WVARIRSKYNNYATYYADSVKDRFTISRDDSKNTAYLQMNNLKTEDTAVYYCVRHGNFGNSYI | |
| | | SYWAYWGQGTLVTVSSGGGGSGGGGSGGGGSQTVVTQEPSLTVSPGGTVTLTCGSSTGAVTSG | |
| | | NYPNWVQQKPGQAPRGLIGGIKFLAPGTPARFSGSLLGGKAALTLSGVQPEDEAEYYCVLWYS | |
| | | NRWVFGGGTKLTVLGGGGSQRFCTGHFGGLHPCNGHHHHHH | |
| 263. | CH19_5-B3xI2C6-LH-FcB- | QRFVTGHFGGLHPANGGGGGSQVQLVQSGAEVKKPGASVKVSCKASGYTFTYYGISWVRQAPG | |
| | CH | QGLEWMGWINPYGGETNYAQKLQGRVTMTTDTSTSTAYMELRSLRSDDTAVYYCARGSGGFDY | |
| | | WGQGTLVTVSSGGGGSGGGGSGGGGSDIVMTQTPLSLSVTPGEPASISCRSSQSLLHSNGYNY | |
| | | LDWYLQKPGQSPQLLIYLGSYRASGVPDRFSGSGSGTDFTLKISRVEAEDVGVYYCMQALQTP | |
| | | FTFGPGTKVDIKSGGGGSEVQLVESGGGLVQPGGSLKLSCAASGFTFNKYAMNWVRQAPGKGL | |
| | | EWVARIRSKYNNYATYYADSVKDRFTISRDDSKNTAYLQMNNLKTEDTAVYYCVRHGNFGNSY | |
| | | ISYWAYWGQGTLVTVSSGGGGSGGGGSGGGGSQTVVTQEPSLTVSPGGIVTLTCGSSTGAVTS | |
| | | GNYPNWVQQKPGQAPRGLIGGTKFLAPGTPARFSGSLLGGKAALTLSGVQPEDEAEYYCVLWY | |
| | | SNRWVFGGGTKLIVLGGGGSQRFCIGHFGGLHPCNGHHHHHH | |
| 264. | CH19_5-E10xI2C6-LH- | QRFVTGHFGGLHPANGGGGGSQVQLVQSGAEVKKPGASVKVSCKASGYTFTYYGISWVRQAPG | |
| | FcB-CH | QGLEWMGWINPYSGATNYAQKLQGRVTMTTDTSTSTAYMELRSLRSDDTAVYYCARGSGGFDY | |
| | | WGQGTLVTVSSGGGGSGGGGSGGGGSDIVMTQTPLSLSVTPGEPASISCRSSQSLLHSNGYNY | |
| | | LDWYLQKPGQSPQLLIYLGSYRASGVPDRFSGSGSGTDFTLKISRVEAEDVGVYYCMQALQTP | |
| | | FTFGPGTKVDIKSGGGGSEVQLVESGGGLVQPGGSLKLSCAASGFTFNKYAMNWVRQAPGKGL | |
| | | EWVARIRSKYNNYATYYADSVKDRFTISRDDSKNTAYLQMNNLKTEDTAVYYCVRHGNFGNSY | |
| | | ISYWAYWGQGTLVTVSSGGGGSGGGGSGGGGSQTVVTQEPSLTVSPGGIVTLTCGSSTGAVTS | |
| | | GNYPNWVQQKPGQAPRGLIGGTKFLAPGTPARFSGSLLGGKAALTLSGVQPEDEAEYYCVLWY | |
| | | SNRWVFGGGTKLTVLGGGGSQRFCTGHFGGLHPCNGHHHHHH | |
| 265. | CH19_6-G10xI2C6-LH- | QRFVTGHFGGLHPANGGGGGSQVQLVQSGAEVKKPGASVKVSCKASGYTFTYYGISWVRQAPG | |
| | FcB-CH | QGLEWMGWINPYTGKTNYAQKLQGRVTMTIDTSTSTAYMELRSLRSDDTAVYYCARGSGGFDY | |
| | | WGQGTLVTVSSGGGGSGGGGSGGGGSDIVMTQTPLSLSVTPGEPASISCRSSQSLLHSNGYNY | |
| | | LDWYLQKPGQSPQLLIYLGSYRASGVPDRFSGSGSGIDFTLKISRVEAEDVGVYYCMQALQTP | |
| | | FTFGPGTKVDIKSGGGGSEVQLVESGGGLVQPGGSLKLSCAASGFTFNKYAMNWVRQAPGKGL | |
| | | EWVARIRSKYNNYATYYADSVKDRFTISRDDSKNTAYLQMNNLKTEDTAVYYCVRHGNFGNSY | |
| | | ISYWAYWGQGTLVTVSSGGGGSGGGGSGGGGSQTVVTQEPSLTVSPGGIVTLTCGSSTGAVTS | |
| | | GNYPNWVQQKPGQAPRGLIGGTKFLAPGTPARFSGSLLGGKAALTLSGVQPEDEAEYYCVLWY | |
| | | SNRWVFGGGTKLIVLGGGGSQRFCIGHFGGLHPCNGHHHHHH | |
| 266. | CH19_4-H8xI2C6-LH-FcB- | QRFVTGHFGGLHPANGGGGGSQVQLVQSGAEVKKPGASVKVSCKASGYTFTYYGISWVRQAPG | |
| | CH | QGLEWMGWINPYIGKTNYAQKLQGRVIMITDTSTSTAYMELRSLRSDDTAVYYCARGSGGFDY | |
| | | WGQGTLVTVSSGGGGSGGGGSGGGGSDIVMTQTPLSLSVTPGEPASISCRSSQSLLHSVGYNY | |
| | | LDWYLQKPGQSPQLLIYLGSYRASGVPDRFSGSGSGIDFTLKISRVEAEDVGVYYCMQALQTP | |
| | | FTFGPGTKVDIKSGGGGSEVQLVESGGGLVQPGGSLKLSCAASGFTFNKYAMNWVRQAPGKGL | |
| | | EWVARIRSKYNNYATYYADSVKDRFTISRDDSKNTAYLQMNNLKTEDTAVYYCVRHGNFGNSY | |
| | | ISYWAYWGQGTLVTVSSGGGGSGGGGSGGGGSQTVVIQEPSLIVSPGGIVTLICGSSIGAVIS | |
| | | GNYPNWVQQKPGQAPRGLIGGTKFLAPGTPARFSGSLLGGKAALTLSGVQPEDEAEYYCVLWY | |
| | | SNRWVFGGGTKLTVLGGGGSQRFCTGHFGGLHPCNGHHHHHH | |
| 267. | CH19_2-E4xI2C6-LH-FcB- | QRFVTGHFGGLHPANGGGGGSQVQLVQSGAEVKKPGASVKVSCKASGYTFTSYGISWVRQAPG | |
| | CH | QGLEWMGWINPYIGNRNYAQKVQDRVIMITDTSINTAYMELSSLRSDDTAVYYCARGSGGFDY | |
| | | WGQGTLVTVSSGGGGSGGGGSGGGGSDIVMTQSPLSLPVTLGQPASISCRSSQSLLHSVGYNY | |
| | | LDWYLQKPGQSPQLLIYLGSNRASGVPDRFSGSGSGTDFTLKISRVEAEDVGVYYCMQALQTP | |
| | | FTFGPGTKLEIKSGGGGSEVQLVESGGGLVQPGGSLKLSCAASGFTFNKYAMNWVRQAPGKGL | |
| | | EWVARIRSKYNNYATYYADSVKDRFTISRDDSKNTAYLQMNNLKTEDTAVYYCVRHGNFGNSY | |
| | | ISYWAYWGQGTLVTVSSGGGGSGGGGSGGGGSQTVVIQEPSLIVSPGGIVTLICGSSIGAVIS | |
| | | GNYPNWVQQKPGQAPRGLIGGTKFLAPGTPARFSGSLLGGKAALTLSGVQPEDEAEYYCVLWY | |
| | | SNRWVFGGGTKLTVLGGGGSQRFCTGHFGGLHPCNGHHHHHH | |
| 268. | CH19_6-B8xI2C6-LH-FcB- | QRFVTGHFGGLHPANGGGGGSQVQLVQSGAEVKKPGASVKVSCKASGYTFTYYGISWVRQAPG | |
| | CH | QGLEWMGWINPYTGKTNYAQKLQDRVTMTTDTSTNTAYMELRSLRSDDTAVYYCARGSGGFDY | |
| | | WGQGTLVTVSSGGGGSGGGGSGGGGSDIVMTQTPLSLPVTPGEPASISCRSSQSLLHSVGYNY | |
| | | LDWYLQKPGQSPQLLIYLGSNRASGVPDRFSGSGSGIDFTLKISRVEAEDVGVYYCMQALQIP | |
| | | FTFGPGTKVDIKSGGGGSEVQLVESGGGLVQPGGSLKLSCAASGFTFNKYAMNWVRQAPGKGL | |
| | | EWVARIRSKYNNYATYYADSVKDRFTISRDDSKNTAYLQMNNLKTEDTAVYYCVRHGNFGNSY | |
| | | ISYWAYWGQGTLVTVSSGGGGSGGGGSGGGGSQTVVTQEPSLTVSPGGTVTLTCGSSTGAVTS | |
| | | GNYPNWVQQKPGQAPRGLIGGTKFLAPGTPARFSGSLLGGKAALTLSGVQPEDEAEYYCVLWY | |
| | | SNRWVFGGGTKLTVLGGGGSQRFCTGHFGGLHPCNGHHHHHH | |
| 269. | CH19_0-B4xI2C6-LH-FcB- | QRFVTGHFGGLHPANGGGGGSQVQLVQSGAEVKKPGASVKVSCKASGYTFTTYGISWVRQAPG | |
| | CH | QGLEWMGWINPYTGKTNYAQKLQGRVTMATDTSTSTAYMELRSLRSDDTAVYYCARGSGGFDY | |
| | | WGQGTLVTVSSGGGGSGGGGSGGGGSDIVMTQSPLSLPVTPGEPASISCRSSQSLLHSVGYNY | |
| | | LDWYLQKPGQSPQLLIYLGSNRASGVPDRFSGSGSGTDFTLKISRVEAEDVGVYYCMQALQTP | |
| | | FTFGPGTKLEIKSGGGGSEVQLVESGGGLVQPGGSLKLSCAASGFTFNKYAMNWVRQAPGKGL | |
| | | EWVARIRSKYNNYATYYADSVKDRFTISRDDSKNTAYLQMNNLKTEDTAVYYCVRHGNFGNSY | |
| | | ISYWAYWGQGTLVTVSSGGGGSGGGGSGGGGSQTVVTQEPSLTVSPGGTVTLTCGSSTGAVTS | |
| | | GNYPNWVQQKPGQAPRGLIGGTKFLAPGTPARFSGSLLGGKAALTLSGVQPEDEAEYYCVLWY | |
| | | SNRWVFGGGTKLTVLGGGGSQRFCTGHFGGLHPCNGHHHHHH | |
| 270. | CH19_9-F1xI2C6-LH-FcB- | QRFVIGHFGGLHPANGGGGGSQVQLVQSGAEVKEPGASVKVSCKASGYTFTYYGISWVRQAPG | |
| | CH | QGLEWMGWINPYTGNRNYAQKVQDRVTMTTDTSTNTAYMELRSLRSDDTAVYYCARGSGGFDY | |
| | | WGQGTLVTVSSGGGGSGGGGSGGGGSDIVMTQSPLSLPVTPGEPASISCRSSQSLLHSVGYNY | |
| | | LDWYLQKPGQSPQLLIYLGSNRASGVPDRFSGSGSGIDFTLKISRVEAEDVGVYYCMQALQIP | |
| | | FTFGPGTKLEIKSGGGGSEVQLVESGGGLVQPGGSLKLSCAASGFTFNKYAMNWVRQAPGKGL | |
| | | EWVARIRSKYNNYATYYADSVKDRFTISRDDSKNTAYLQMNNLKTEDTAVYYCVRHGNFGNSY | |
| | | ISYWAYWGQGTLVTVSSGGGGSGGGGSGGGGSQTVVTQEPSLTVSPGGTVTLTCGSSTGAVTS | |
| | | GNYPNWVQQKPGQAPRGLIGGTKFLAPGTPARFSGSLLGGKAALTLSGVQPEDEAEYYCVLWY | |
| | | SNRWVFGGGTKLTVLGGGGSQRFCTGHFGGLHPCNGHHHHHH | |
| 271. | CH19_4-A7xI2C6-LH-FcB- | QRFVTGHFGGLHPANGGGGGSQVQLVQSGAEVKKPGASVKVSCKASGYTFTYYGISWVRQAPG | |
| | CH | QGLEWMGWINPYIGKTNYAQKLQGRVIMITDTSTSTAYMELRSLRSDDTAVYYCARGSGGFDY | |
| | | WGQGTLVTVSSGGGGSGGGGSGGGGSDIVMTQSPLSLPVTPGEPASISCRSSQSLLHSVGYNY | |
| | | LDWYLQKPGQSPQLLIYLGSNRASGVPDRFSGSGSGIDFTLKISRVEAEDVGVYYCMQALQIP | |
| | | FTFGPGTKVEIKSGGGGSEVQLVESGGGLVQPGGSLKLSCAASGFTFNKYAMNWVRQAPGKGL | |
| | | EWVARIRSKYNNYATYYADSVKDRFTISRDDSKNTAYLQMNNLKTEDTAVYYCVRHGNFGNSY | |
| | | ISYWAYWGQGTLVTVSSGGGGSGGGGSGGGGSQTVVTQEPSLTVSPGGTVTLTCGSSTGAVTS | |
| | | GNYPNWVQQKPGQAPRGLIGGTKFLAPGTPARFSGSLLGGKAALTLSGVQPEDEAEYYCVLWY | |
| | | SNRWVFGGGTKLTVLGGGGSQRFCTGHFGGLHPCNGHHHHHH | |
| 272. | CH19_6-E12xI2C6-LH- | QRFVIGHFGGLHPANGGGGGSQVQLVQSGAEVKKPGASVKVSCKASGYTFTSYGITWVRQAPG | |
| | FcB-CH | QGLEWMGWINPYTGNRNYAQKVQGRVTMTTDTSTSTAYMELRSLRSDDTAVYYCARGSGGFDY | |
| | | WGQGTLVTVSSGGGGSGGGGSGGGGSDIVMTQSPLSLSVTPGEPASISCRSSQSLLHSVGYNY | |
| | | LDWYLQKPGQSPQLLIYLGSNRASGVPDRFSGSGSGIDFTLKISRVEAEDVGVYYCMQALQIP | |
| | | FTFGPGTKVDIKSGGGGSEVQLVESGGGLVQPGGSLKLSCAASGFTFNKYAMNWVRQAPGKGL | |
| | | EWVARIRSKYNNYATYYADSVKDRFTISRDDSKNTAYLQMNNLKTEDTAVYYCVRHGNFGNSY | |
| | | ISYWAYWGQGTLVTVSSGGGGSGGGGSGGGGSQTVVIQEPSLIVSPGGIVTLICGSSIGAVIS | |
| | | GNYPNWVQQKPGQAPRGLIGGTKFLAPGTPARFSGSLLGGKAALTLSGVQPEDEAEYYCVLWY | |
| | | SNRWVFGGGTKLTVLGGGGSQRFCTGHFGGLHPCNGHHHHHH | |
| 273. | CH19_6-C12xI2C6-LH- | QRFVTGHFGGLHPANGGGGGSQVQLVQSGAEVKKPGASVKVSCKASGYTFTSYGISWVRQAPG | |
| | FcB-CH | QGLEWMGWINPYTGNRNYAQKFQGRVTMTTDTSTNTAYMELSSLRSEDTAVYYCARGSGGFDY | |
| | | WGQGTLVTVSSGGGGSGGGGSGGGGSDIVMTQSPLSLPVTPGEPASISCRSSQSLLHSVGYNY | |
| | | LDWYLQKPGQSPQLLIYLGSNRASGVPDRFSGSGSGTDFTLKISRVEAEDVGVYYCMQALQTP | |
| | | FTFGPGTKVDIKSGGGGSEVQLVESGGGLVQPGGSLKLSCAASGFTFNKYAMNWVRQAPGKGL | |
| | | EWVARIRSKYNNYATYYADSVKDRFTISRDDSKNTAYLQMNNLKTEDTAVYYCVRHGNFGNSY | |
| | | ISYWAYWGQGTLVTVSSGGGGSGGGGSGGGGSQTVVTQEPSLTVSPGGTVTLTCGSSTGAVTS | |
| | | GNYPNWVQQKPGQAPRGLIGGTKFLAPGTPARFSGSLLGGKAALTLSGVQPEDEAEYYCVLWY | |
| | | SNRWVFGGGTKLTVLGGGGSQRFCTGHFGGLHPCNGHHHHHH | |
| 274. | CH19_6-A7xI2C6-LH-FcB- | QRFVTGHFGGLHPANGGGGGSQVQLVQSGAEVKKPGASVKVSCKASGYSFTSYGISWVRQAPG | |
| | CH | QGLEWMGWINPYTGNRNYAQKVQGRVTMTTDTSTSTAYMELRSLRSDDTAVYYCARGSGGFDY | |
| | | WGQGILVTVSSGGGGSGGGGSGGGGSDIVMTQSPLSLPVTPGEPASISCRSSQSLLHSVGYNY | |
| | | LDWYLQKPGQSPQLLIYLGSNRASGVPDRFSGSGSGTDFTLKISRVEAEDVGVYYCMQALQTP | |
| | | FTFGPGTKVEIKSGGGGSEVQLVESGGGLVQPGGSLKLSCAASGFTFNKYAMNWVRQAPGKGL | |
| | | EWVARIRSKYNNYATYYADSVKDRFTISRDDSKNTAYLQMNNLKTEDTAVYYCVRHGNFGNSY | |
| | | ISYWAYWGQGTLVTVSSGGGGSGGGGSGGGGSQTVVTQEPSLTVSPGGTVTLTCGSSTGAVTS | |
| | | GNYPNWVQQKPGQAPRGLIGGTKFLAPGTPARFSGSLLGGKAALTLSGVQPEDEAEYYCVLWY | |
| | | SNRWVFGGGTKLTVLGGGGSQRFCTGHFGGLHPCNGHHHHHH | |
| 275. | CH19_6-G8xI2C6-LH-FcB- | QRFVTGHFGGLHPANGGGGGSQVQLVQSGAEVKKPGASVKVSCKASGYTFTYYGISWVRQAPG | |
| | CH | QGLEWMGWINPYTGKTNYAQKVQGRVTMTTDTSTSTAYMELRNLRSDDTAVYYCARGSGGFDY | |
| | | WGQGTLVTVSSGGGGSGGGGSGGGGSDIVMTQTPLSLSVTPGQPASISCRSSQSLLHSVGYNY | |
| | | LDWYLQKPGQSPQLLIYLGSNRASGVPDRFSGSGSGTDFTLKISRVEAEDVGVYYCMQALQTP | |
| | | FTFGPGTKVDIKSGGGGSEVQLVESGGGLVQPGGSLKLSCAASGFTFNKYAMNWVRQAPGKGL | |
| | | EWVARIRSKYNNYATYYADSVKDRFTISRDDSKNTAYLQMNNLKTEDTAVYYCVRHGNFGNSY | |
| | | ISYWAYWGQGTLVTVSSGGGGSGGGGSGGGGSQTVVTQEPSLTVSPGGTVTLTCGSSTGAVTS | |
| | | GNYPNWVQQKPGQAPRGLIGGTKFLAPGTPARFSGSLLGGKAALTLSGVQPEDEAEYYCVLWY | |
| | | SNRWVFGGGTKLTVLGGGGSQRFCTGHFGGLHPCNGHHHHHH | |
| 276. | CH19_6-F9xI2C6-LH-FcB- | QRFVTGHFGGLHPANGGGGGSQVQLVQSGAEVKKPGASVKVSCKASGYTFTYYGISWVRQAPG | |
| | CH | QGLEWMGWINPYTGKTNYAQKLQGRVTMTIDTSTSTAYMELRSLRSDDTAVYYCARGSGGFDY | |
| | | WGQGTLVTVSSGGGGSGGGGSGGGGSDIVMTQTPLSLSVTPGQPASISCRSSQSLLHSVGYNY | |
| | | LDWYLQKPGQSPQLLIYLGSNRASGVPDRFSGSGSGIDFTLKISRVEAEDVGVYYCMQALQTP | |
| | | FTFGPGTKVDIKSGGGGSEVQLVESGGGLVQPGGSLKLSCAASGFTFNKYAMNWVRQAPGKGL | |
| | | EWVARIRSKYNNYATYYADSVKDRFTISRDDSKNTAYLQMNNLKTEDTAVYYCVRHGNFGNSY | |
| | | ISYWAYWGQGTLVTVSSGGGGSGGGGSGGGGSQTVVTQEPSLTVSPGGTVTLTCGSSTGAVTS | |
| | | GNYPNWVQQKPGQAPRGLIGGTKFLAPGTPARFSGSLLGGKAALTLSGVQPEDEAEYYCVLWY | |
| | | SNRWVFGGGTKLTVLGGGGSQRFCTGHFGGLHPCNGHHHHHH | |
| 277. | CH19_0-C11xI2C6-LH- | QRFVTGHFGGLHPANGGGGGSQVQLVESGGGVVQPGRSLRLSCAASGFTFRNYAMHWVRQAPG | |
| | FcB-CH | KGLEWVAVISYSGNNKYYASSVKGRFTISRDNSKNTLYLQLNSLRAEDTAVYYCAREFYYDST | |
| | | GYDYSTPGDYWGQGTLVTVSSGGGGSGGGGSGGGGSDIQMTQSPSSLSASVGDRVTITCQASQ | |
| | | DISNYLNWYQQKPGKAPKLLIYDASNLEIGVPSRFSGSGSGTDFIFTISSLQPEDIATYYCQQ | |
| | | YDNLPTFGQGTRLEIKSGGGGSEVQLVESGGGLVQPGGSLKLSCAASGFTFNKYAMNWVRQAP | |
| | | GKGLEWVARIRSKYNNYATYYADSVKDRFTISRDDSKNTAYLQMNNLKTEDTAVYYCVRHGNF | |
| | | GNSYISYWAYWGQGTLVTVSSGGGGSGGGGSGGGGSQTVVTQEPSLTVSPGGTVTLTCGSSTG | |
| | | AVTSGNYPNWVQQKPGQAPRGLIGGTKFLAPGTPARFSGSLLGGKAALTLSGVQPEDEAEYYC | |
| | | VLWYSNRWVEGGGIKLIVLGGGGSQRFCIGHFGGLHPCNGHHHHHH | |
| 278. | CH19_8-F6xI2C6-LH-FcB- | QRFVTGHFGGLHPANGGGGGSQVQLVESGGGVVQPGRSLRLSCVASGFTFRNYAMHWVRQAPG | |
| | CH | KGLEWVAVISYSGNNKYYASSVKGRFTISRDNSKNTLYLQLNSLRAEDTAVYYCAREFYYDST | |
| | | GYDYSTPGDYWGQGTLVTVSSGGGGSGGGGSGGGGSDIQMTQSPSSLSASVGDRVTITCRASQ | |
| | | SISSYLNWYQQKPGKAPKLLIYDASSLQSGVPSRFSGSGSGTEFTLTISSLQAEDVAVYYCQQ | |
| | | YYSTPLIFGGGTKVDIKSGGGGSEVQLVESGGGLVQPGGSLKLSCAASGFTFNKYAMNWVRQA | |
| | | PGKGLEWVARIRSKYNNYATYYADSVKDRFTISRDDSKNTAYLQMNNLKTEDTAVYYCVRHGN | |
| | | EGNSYISYWAYWGQGTLVIVSSGGGGSGGGGSGGGGSQTVVIQEPSLIVSPGGIVTLICGSST | |
| | | GAVTSGNYPNWVQQKPGQAPRGLIGGTKFLAPGTPARFSGSLLGGKAALTLSGVQPEDEAEYY | |
| | | CVLWYSNRWVFGGGTKLTVLGGGGSQRFCTGHFGGLHPCNGHHHHHH | |
| 279. | CH19_0-G9xI2C6-LH-FcB- | QRFVTGHFGGLHPANGGGGGSQVQLVESGGGVVQPGRSLRLSCAASGFTFRNYAMHWVRQAPG | |
| | CH | KGLEWVAGISYSGTNKYYASSVKGRFTISRDNSKNTLYLQLNSLRAEDTAVYYCAREFYYDST | |
| | | GYDYSTPGDYWGQGTLVTVSSGGGGSGGGGSGGGGSDIQMTQSPSSLSASVGDRVTITCQASQ | |
| | | DISNYLNWYQQKPGKAPKLLIYDASNLETGVPSRFSGSGSGTEFTLTISSLQPEDIATYYCQQ | |
| | | YDNLPLIFGGGTKVDIKSGGGGSEVQLVESGGGLVQPGGSLKLSCAASGFTFNKYAMNWVRQA | |
| | | PGKGLEWVARIRSKYNNYATYYADSVKDRFTISRDDSKNTAYLQMNNLKTEDTAVYYCVRHGN | |
| | | FGNSYISYWAYWGQGTLVTVSSGGGGSGGGGSGGGGSQTVVTQEPSLTVSPGGTVTLTCGSST | |
| | | GAVTSGNYPNWVQQKPGQAPRGLIGGTKFLAPGTPARFSGSLLGGKAALTLSGVQPEDEAEYY | |
| | | CVLWYSNRWVFGGGTKLTVLGGGGSQRFCTGHFGGLHPCNGHHHHHH | |
| 280. | CH19_1-E11xI2C6-LH- | QRFVTGHFGGLHPANGGGGGSQVQLVESGGGVVQPGRSLRLSCVASGFTFRNYAMHWVRQAPG | |
| | FcB-CH | KGLEWVAVISYSGNNKYYASSVKGRFTISRDNSKNTLFLQLNSLRAEDTAVYYCAREFYYDST | |
| | | GYDYSTPGNYWGQGTLVTVSSGGGGSGGGGSGGGGSDIQMTQSPSSLSASVGDRVTITCQASQ | |
| | | DISNYLNWYQQKPGKAPKLLIYDASNLEIGVPSRFSGSGSGTDFIFTISSLQPEDIATYYCQQ | |
| | | YVNLPLTEGGGTKLEIKSGGGGSEVQLVESGGGLVQPGGSLKLSCAASGFTFNKYAMNWVRQA | |
| | | PGKGLEWVARIRSKYNNYATYYADSVKDRFTISRDDSKNTAYLQMNNLKTEDTAVYYCVRHGN | |
| | | FGNSYISYWAYWGQGTLVTVSSGGGGSGGGGSGGGGSQTVVTQEPSLTVSPGGTVTLTCGSST | |
| | | GAVTSGNYPNWVQQKPGQAPRGLIGGIKFLAPGIPARFSGSLLGGKAALTLSGVQPEDEAEYY | |
| | | CVLWYSNRWVFGGGTKLTVLGGGGSQRFCTGHFGGLHPCNGHHHHHH | |
| 281. | CH19_0-F5xI2C6-LH-FcB- | QRFVIGHEGGLHPANGGGGGSQVQLVESGGGVVQPGRSLRLSCAASGETESSYGMQWVRQAPG | |
| | CH | KGLEWVAVIWYSGSNKYYASSVKGRFTISRDNSKNTLYLQMNSLRAEDTAVYYCARDGYPIFY | |
| | | RYYGMDVWGQGTTVTVSSGGGGSGGGGSGGGGSDIQMTQSPSSLSASVGDRVTITCRASQGIS | |
| | | NYLAWYQQKPGKVPKLLIYAASTLQSGVPSRFSGSGSGTDFTLTISSLQPEDVATYYCQKYNS | |
| | | APLTFGGGTKVEIKSGGGGSEVQLVESGGGLVQPGGSLKLSCAASGFTFNKYAMNWVRQAPGK | |
| | | GLEWVARIRSKYNNYATYYADSVKDRFTISRDDSKNTAYLQMNNLKTEDTAVYYCVRHGNFGN | |
| | | SYISYWAYWGQGTLVTVSSGGGGSGGGGSGGGGSQTVVTQEPSLTVSPGGTVTLTCGSSTGAV | |
| | | TSGNYPNWVQQKPGQAPRGLIGGTKFLAPGTPARFSGSLLGGKAALTLSGVQPEDEAEYYCVL | |
| | | WYSNRWVFGGGTKLTVLGGGGSQRFCTGHFGGLHPCNGHHHHHH | |
| 282. | CH19_1-E1xI2C6-LH-FcB- | QRFVTGHFGGLHPANGGGGGSQVQLVESGGGVVQPGRSLRLSCAASGFTFSSYGMHWVRQAPG | |
| | CH | KGLEWVAVISYSGSNKYYASSVKGRFTISRDNSKNTLYLQMNSLRAEDTAVYYCARDGYPIFY | |
| | | RYYGMDVWGQGTIVIVSSGGGGSGGGGSGGGGSEIVLIQSPGILSLSPGERAILSCRASQSVS | |
| | | SSYLAWYQQKPGQAPRLLIYGASSRATGIPDRFSGSGSGTDFTLIISRLEPEDLAVYYCQQYG | |
| | | TSPLTFGGGTKLEIKSGGGGSEVQLVESGGGLVQPGGSLKLSCAASGFTFNKYAMNWVRQAPG | |
| | | KGLEWVARIRSKYNNYATYYADSVKDRFTISRDDSKNTAYLQMNNLKTEDTAVYYCVRHGNFG | |
| | | NSYISYWAYWGQGTLVTVSSGGGGSGGGGSGGGGSQTVVTQEPSLTVSPGGTVTLTCGSSTGA | |
| | | VTSGNYPNWVQQKPGQAPRGLIGGTKFLAPGTPARFSGSLLGGKAALTLSGVQPEDEAEYYCV | |
| | | LWYSNRWVEGGGIKLTVLGGGGSQRFCTGHFGGLHPCNGHHHHHH | |
| 283. | CH19_1-E6xI2C6-LH-FcB- | QRFVTGHFGGLHPANGGGGGSQVQLVESGGGVVQPGRSLRLSCAASGFTFSSFGMHWVRQAPG | |
| | CH | KGLEWVAFIWYSGSNKYYASSVKGRVTISRDNSKNTLYLQMNSLRAEDTAVYYCARDGYPIFY | |
| | | YYYGMDVWGQGTTVTVSSGGGGSGGGGSGGGGSEIVLTQSPGTLSLSPGERATLSCRASQSVS | |
| | | SSYLAWYQQKPGQAPRLLIYGASSRATGIPDRFSGSGSGTDFTLIISRLEPEDFAVYYCQQYG | |
| | | SSPFTFGPGTRLEIKSGGGGSEVQLVESGGGLVQPGGSLKLSCAASGFTFNKYAMNWVRQAPG | |
| | | KGLEWVARIRSKYNNYATYYADSVKDRFTISRDDSKNTAYLQMNNLKTEDTAVYYCVRHGNFG | |
| | | NSYISYWAYWGQGTLVTVSSGGGGSGGGGSGGGGSQTVVTQEPSLTVSPGGTVTLTCGSSTGA | |
| | | VTSGNYPNWVQQKPGQAPRGLIGGTKFLAPGTPARFSGSLLGGKAALTLSGVQPEDEAEYYCV | |
| | | LWYSNRWVFGGGTKLTVLGGGGSQRFCTGHFGGLHPCNGHHHHHH | |
| 284. | CH19_2G6_302_VKGxI2C6- | QRFVTGHFGGLHPANGGGGGSQVQLVESGGGVVQPGGSLRLSCAASGFTFSSYGMHWVRQAPG | |
| | LH-FcB-LH | KGLEWVAFIWYDGSNKYYADSVKGRFTISRDNSKNTLYLQMNSLRAEDTAVYYCARRAGIIGT | |
| | | IGYYYGMDVWGQGTTVTVSSGGGGSGGGGSGGGGSSYELTQPPSVSVSPGQTASITCSGDRLG | |
| | | EKYTSWYQQRPGQSPLLVIYQDTKRPSGIPERFSGSNSGNTATLIISGTQAMDEADYYCQAWE | |
| | | SSTVVFGGGTKLTVLSGGGGSEVQLVESGGGLVQPGGSLKLSCAASGFTFNKYAMNWVRQAPG | |
| | | KGLEWVARIRSKYNNYATYYADSVKDRFTISRDDSKNTAYLQMNNLKTEDTAVYYCVRHGNFG | |
| | | NSYISYWAYWGQGTLVTVSSGGGGSGGGGSGGGGSQTVVTQEPSLTVSPGGTVTLTCGSSTGA | |
| | | VTSGNYPNWVQQKPGQAPRGLIGGTKFLAPGTPARFSGSLLGGKAALTLSGVQPEDEAEYYCV | |
| | | LWYSNRWVFGGGTKLTVLGGGGSQRFVTGHFGGLHPANGHHHHHH | |
| 285. | CH19_0-E11xI2C6-LH- | QRFVTGHFGGLHPANGGGGGSQVQLQESGPGLVKPSQTLSLTCTVSGGSISRGGYYWSWIRQH | |
| | FcB-LH | PGKGLEWIGYIFYRGRTYYNPSLKSRVTISVDTSKNQFSLKLSSVTAADTAVYYCARVNSNYG | |
| | | WFDPWGQGTLVTVSSGGGGSGGGGSGGGGSEIVLTQFPGILSLSPGERATLSCRASQSVSSSY | |
| | | LAWYQQKPGQAPRLLIYGASSRATGIPDRFSGSGSGTDFTLTISRLEPEDFAVYYCQQYGSSP | |
| | | LTFGGGTKLEIKSGGGGSEVQLVESGGGLVQPGGSLKLSCAASGFTFNKYAMNWVRQAPGKGL | |
| | | EWVARIRSKYNNYATYYADSVKDRFTISRDDSKNTAYLQMNNLKTEDTAVYYCVRHGNFGNSY | |
| | | ISYWAYWGQGTLVTVSSGGGGSGGGGSGGGGSQTVVTQEPSLTVSPGGTVTLTCGSSTGAVTS | |
| | | GNYPNWVQQKPGQAPRGLIGGTKFLAPGTPARFSGSLLGGKAALTLSGVQPEDEAEYYCVLWY | |
| | | SNRWVFGGGTKLTVLGGGGSQRFVTGHFGGLHPANGHHHHHH | |
| 286. | CH19_5-G4xI2C6-LH-FcB- | QRFVTGHFGGLHPANGGGGGSQVQLQESGPGLVKPSQTLSLTCTVSGGSISSGGYYWSWIRQH | |
| | LH | PGKGLEWIGYIFYRGRTYYNPSLKSRVTISVDTSKNQFSLKLSSVTAADTAVYYCARVYSNYG | |
| | | WFDPWGQGTLVTVSSGGGGSGGGGSGGGGSEIVLIQSPGILSLSPGERATLSCRASQSVSSSY | |
| | | LAWYQQKPGQAPRLLIYGTSNRATGIPDRFSGSGSGTDFTLTISRLEPEDFAVYYCQQYGSSP | |
| | | LTFGGGTKLEIKSGGGGSEVQLVESGGGLVQPGGSLKLSCAASGFTFNKYAMNWVRQAPGKGL | |
| | | EWVARIRSKYNNYATYYADSVKDRFTISRDDSKNTAYLQMNNLKTEDTAVYYCVRHGNFGNSY | |
| | | ISYWAYWGQGTLVTVSSGGGGSGGGGSGGGGSQTVVTQEPSLTVSPGGTVTLTCGSSTGAVTS | |
| | | GNYPNWVQQKPGQAPRGLIGGTKFLAPGTPARFSGSLLGGKAALTLSGVQPEDEAEYYCVLWY | |
| | | SNRWVFGGGTKLTVLGGGGSQRFVTGHFGGLHPANGHHHHHH | |
| 287. | CH19_8-H6xI2C6-LH-FcB- | QRFVTGHFGGLHPANGGGGGSQVQLQESGPGLVKPSQTLSLTCTVSGGSISSGGYYWSWIRQH | |
| | LH | PGKGLEWIGYIFYSGRTYYNPSLKSRVTISVDTSKNQFSLKLSSVTAADTAVYYCARVYSNYG | |
| | | WFDPWGQGTLVTVSSGGGGSGGGGSGGGGSEIVLIQSPGILSLSPGERATLSCRASQSVSSSY | |
| | | LAWYQQKPGQAPRLLIYGASSRATGIPDRFSGSGSGIDFTLTISRLEPEDFAVYYCQQYGSSP | |
| | | LTFGGGTKLEIKSGGGGSEVQLVESGGGLVQPGGSLKLSCAASGFTFNKYAMNWVRQAPGKGL | |
| | | EWVARIRSKYNNYATYYADSVKDRFTISRDDSKNTAYLQMNNLKTEDTAVYYCVRHGNFGNSY | |
| | | ISYWAYWGQGTLVTVSSGGGGSGGGGSGGGGSQTVVTQEPSLTVSPGGTVTLTCGSSTGAVTS | |
| | | GNYPNWVQQKPGQAPRGLIGGTKFLAPGTPARFSGSLLGGKAALTLSGVQPEDEAEYYCVLWY | |
| | | SNRWVFGGGTKLTVLGGGGSQRFVTGHFGGLHPANGHHHHHH | |
| 288. | CH19_2-C11xI2C6-LH- | QRFVTGHFGGLHPANGGGGGSQVQLQESGPGLVKPSQTLSLTCTVSGGSISSGGYYWSWIRQH | |
| | FcB-LH | PGKGLEWIGYIFYSGRTYYNPSLKSRVTISVDTSKNQFSLKLRSVTAADTAVYYCARVYSNYG | |
| | | WFDPWGQGTLVTVSSGGGGSGGGGSGGGGSEIVLIQSPGILSLSPGERATLSCRASQSVSSSY | |
| | | LAWYQQKPGQAPRLLIYGASSRATGIPDRFSGSGSGTDFTLTISRLEPEDFAVYYCQQYGSSP | |
| | | LTFGGGTKLEIKSGGGGSEVQLVESGGGLVQPGGSLKLSCAASGFTFNKYAMNWVRQAPGKGL | |
| | | EWVARIRSKYNNYATYYADSVKDRFTISRDDSKNTAYLQMNNLKTEDTAVYYCVRHGNFGNSY | |
| | | ISYWAYWGQGTLVTVSSGGGGSGGGGSGGGGSQTVVIQEPSLIVSPGGIVTLICGSSTGAVIS | |
| | | GNYPNWVQQKPGQAPRGLIGGTKFLAPGTPARFSGSLLGGKAALTLSGVQPEDEAEYYCVLWY | |
| | | SNRWVFGGGTKLTVLGGGGSQRFVTGHFGGLHPANGHHHHHH | |
| 289. | CH19_2-A10xI2C6-LH- | QRFVTGHFGGLHPANGGGGGSQVQLQESGPGLVKPSQTLSLTCTVSGGSISSGGYYWSWIRQH | |
| | FcB-LH | PGKGLEWIGYIYYSGSTFYNPSLRSRVTISVDTSKNQFSLKLSSVTAADTAVYYCARDSSSSR | |
| | | ALDYWGQGTLVTVSSGGGGSGGGGSGGGGSEIVLIQSPGILSLSPGERATLSCRASQSVSSSY | |
| | | LAWYQQKPGQAPRLLIYGASSRATGIPDRFSGSGSGTDFTLTISRLEPEDFAVYYCQQYDSSP | |
| | | RTFGQGTKLEIKSGGGGSEVQLVESGGGLVQPGGSLKLSCAASGFTFNKYAMNWVRQAPGKGL | |
| | | EWVARIRSKYNNYATYYADSVKDRFTISRDDSKNTAYLQMNNLKTEDTAVYYCVRHGNFGNSY | |
| | | ISYWAYWGQGTLVTVSSGGGGSGGGGSGGGGSQTVVIQEPSLIVSPGGIVTLICGSSTGAVIS | |
| | | GNYPNWVQQKPGQAPRGLIGGTKFLAPGTPARFSGSLLGGKAALTLSGVQPEDEAEYYCVLWY | |
| | | SNRWVFGGGTKLTVLGGGGSQRFVTGHFGGLHPANGHHHHHH | |
| 290. | CH19_1-D11xI2C6-LH- | QRFVTGHFGGLHPANGGGGGSQVQLQESGPGLVKPSQTLSLTCTVSGGSISSGGYYWSWIRQH | |
| | FcB-LH | PGKGLEWIGYIYYRGRTYYNPSLKSRVTISVDTSKNQFSLKLSSVTAADTAVYYCARVYSNYG | |
| | | WFDPWGQGTLVTVSSGGGGSGGGGSGGGGSEIVLIQSPGILSLSPGERATLSCRASQSVSSSY | |
| | | LAWYQQKPGQAPRLLIYGASSRATGIPDRFSGSGSGTDFTLTISRLEPEDFAVYYCQQYGSSP | |
| | | LTFGGGTKLEIKSGGGGSEVQLVESGGGLVQPGGSLKLSCAASGFTFNKYAMNWVRQAPGKGL | |
| | | EWVARIRSKYNNYATYYADSVKDRFTISRDDSKNTAYLQMNNLKTEDTAVYYCVRHGNFGNSY | |
| | | ISYWAYWGQGTLVTVSSGGGGSGGGGSGGGGSQTVVTQEPSLTVSPGGTVTLTCGSSTGAVTS | |
| | | GNYPNWVQQKPGQAPRGLIGGTKFLAPGTPARFSGSLLGGKAALTLSGVQPEDEAEYYCVLWY | |
| | | SNRWVFGGGTKLTVLGGGGSQRFVTGHFGGLHPANGHHHHHH | |
| 291. | CH19_9-F9xI2C6-LH-FcB- | QRFVTGHFGGLHPANGGGGGSQVQLQESGPGLVKPSETLSLTCTVSGGSISSGGYYWSWIRQH | |
| | LH | PGKGLEWIGYIFYRGRTYYNPSLKSRVTISVDTSKNQFSLKLSSVTAADTAVYYCARVYSNYG | |
| | | WFDPWGQGTLVTVSSGGGGSGGGGSGGGGSEIVLIQSPGILSLSPGERATLSCRASQSVSSSY | |
| | | LAWYQQKPGQAPRLLIYGASSRATGIPDRFSGSGSGTDFTLTISRLEPEDFAVYYCQQYGSSP | |
| | | TFGGGTKVEIKSGGGGSEVQLVESGGGLVQPGGSLKLSCAASGFIFNKYAMNWVRQAPGKGLE | |
| | | WVARIRSKYNNYATYYADSVKDRFTISRDDSKNTAYLQMNNLKTEDTAVYYCVRHGNFGNSYI | |
| | | SYWAYWGQGTLVTVSSGGGGSGGGGSGGGGSQTVVTQEPSLTVSPGGTVTLTCGSSTGAVTSG | |
| | | NYPNWVQQKPGQAPRGLIGGIKFLAPGTPARFSGSLLGGKAALTLSGVQPEDEAEYYCVLWYS | |
| | | NRWVFGGGTKLTVLGGGGSQRFVTGHFGGLHPANGHHHHHH | |
| 292. | CH19_1-H8xI2C6-LH-FcB- | QRFVTGHFGGLHPANGGGGGSQVQLQESGPGLVKPSQTLSLTCTVSGGSISSGGYYWSWIRQH | |
| | LH | PGKGLEWIGYIFYRGRTYYNPSLKSRVTISVDTSKNQFSLKLSSVTAADTAVYYCARVYSNYG | |
| | | WFDPWGQGTLVTVSSGGGGSGGGGSGGGGSEIVLIQSPGILSLSPGERATLSCRASQSVSSSY | |
| | | LAWYQQKPGQAPRLLIYGASSRATGIPDRFSGSGSGIDFILTISRLEPEDFAVYYCQQYGSSP | |
| | | LTFGGGTKVEIKSGGGGSEVQLVESGGGLVQPGGSLKLSCAASGFTFNKYAMNWVRQAPGKGL | |
| | | EWVARIRSKYNNYATYYADSVKDRFTISRDDSKNTAYLQMNNLKTEDTAVYYCVRHGNFGNSY | |
| | | ISYWAYWGQGTLVTVSSGGGGSGGGGSGGGGSQTVVTQEPSLTVSPGGTVTLTCGSSTGAVTS | |
| | | GNYPNWVQQKPGQAPRGLIGGTKFLAPGTPARFSGSLLGGKAALTLSGVQPEDEAEYYCVLWY | |
| | | SNRWVFGGGTKLTVLGGGGSQRFVTGHFGGLHPANGHHHHHH | |
| 293. | CH19_1-B12xI2C6-LH- | QRFVTGHFGGLHPANGGGGGSQVQLQESGPGLVKPSQTLSLTCTVSGGSISSGGYYWSWIRQH | |
| | FcB-LH | PGKGLEWIGYIYYRGRTYYNPSLKSRVTISVDTSKNQFSLKLSSVTAADTAVYYCARVYSNYG | |
| | | WFDPWGQGTLVTVSSGGGGSGGGGSGGGGSEIVLIQSPGILSLSPGERATLSCRASQSVSSSY | |
| | | LAWYQQKPGQAPRLLIYGASSRATGIPDRFSGSGSGIDFILTISRLEPEDFAVYYCQQYGSSP | |
| | | TFGPGTKVEIKSGGGGSEVQLVESGGGLVQPGGSLKLSCAASGFTFNKYAMNWVRQAPGKGLE | |
| | | WVARIRSKYNNYATYYADSVKDRFTISRDDSKNTAYLQMNNLKTEDTAVYYCVRHGNFGNSYI | |
| | | SYWAYWGQGTLVTVSSGGGGSGGGGSGGGGSQTVVTQEPSLTVSPGGTVTLTCGSSTGAVTSG | |
| | | NYPNWVQQKPGQAPRGLIGGTKFLAPGTPARFSGSLLGGKAALTLSGVQPEDEAEYYCVLWYS | |
| | | NRWVFGGGTKLTVLGGGGSQRFVTGHFGGLHPANGHHHHHH | |
| 294. | CH19_0-C4xI2C6-LH-FcB- | QRFVTGHFGGLHPANGGGGGSQVQLQESGPGLVKPSQTLSLTCTVSGGSISSGGYYWSWIRQH | |
| | LH | PGKGLEWIGYIYYRGRTYYNPSLKSRVTISVDTSKNQFSLKLSSVTAADTAVYYCARVYSNYG | |
| | | WFDPWGQGTLVTVSSGGGGSGGGGSGGGGSEIVLTQSPGTLSLSPGERATLSCRASQSVSSSY | |
| | | LAWYQQKPGQAPRLLIYGASSRATGIPDRFSGSGSGIDFILTISRLEPEDFAVYYCQQYGSSP | |
| | | TFGGGTKVEIKSGGGGSEVQLVESGGGLVQPGGSLKLSCAASGFTFNKYAMNWVRQAPGKGLE | |
| | | WVARIRSKYNNYATYYADSVKDRFTISRDDSKNTAYLQMNNLKTEDTAVYYCVRHGNFGNSYI | |
| | | SYWAYWGQGTLVTVSSGGGGSGGGGSGGGGSQTVVTQEPSLTVSPGGTVTLTCGSSTGAVTSG | |
| | | NYPNWVQQKPGQAPRGLIGGTKFLAPGTPARFSGSLLGGKAALTLSGVQPEDEAEYYCVLWYS | |
| | | NRWVFGGGTKLTVLGGGGSQRFVTGHFGGLHPANGHHHHHH | |
| 295. | CH19_3-F2xI2C6-LH-FcB- | QRFVIGHFGGLHPANGGGGGSQVQLQESGPGLVKPSQTLSLICTISGGSISSGGYYWSWIRQH | |
| | LH | PGKGLEWIGYIFYSGRTYYNPSLKSRVTISVDTSKNQFSLKLTSVTAADTAVYYCARVNSNYG | |
| | | WFDPWGQGTLVTVSSGGGGSGGGGSGGGGSEIVLIQSPGILSLSPGERATLSCRASQSVSSSY | |
| | | LAWYQQKPGQAPRLLIYGASSRATGIPDRFSGSGSGTDFTLTISRLEPEDFAVYYCQQYGSSP | |
| | | TFGGGTKVEIKSGGGGSEVQLVESGGGLVQPGGSLKLSCAASGFIFNKYAMNWVRQAPGKGLE | |
| | | WVARIRSKYNNYATYYADSVKDRFTISRDDSKNTAYLQMNNLKTEDTAVYYCVRHGNFGNSYI | |
| | | SYWAYWGQGTLVTVSSGGGGSGGGGSGGGGSQTVVTQEPSLTVSPGGTVTLTCGSSTGAVTSG | |
| | | NYPNWVQQKPGQAPRGLIGGTKFLAPGTPARFSGSLLGGKAALTLSGVQPEDEAEYYCVLWYS | |
| | | NRWVFGGGTKLTVLGGGGSQRFVTGHFGGLHPANGHHHHHH | |
| 296. | CH19_3-B10xI2C6-LH- | QRFVTGHFGGLHPANGGGGGSQVQLQESGPGLVKPSQTLSLTCTVSGGSISSGGYYWSWIRQH | |
| | FcB-LH | PGKGLDWIGYIFYRGRTYYNPSLKSRVTISVDTSKNQFSLKLSSVTAADTAVYYCARVNSNYG | |
| | | WFDPWGQGTLVTVSSGGGGSGGGGSGGGGSEIVLIQSPGILSLSPGERATLSCRASQSVSSSY | |
| | | LAWYQQKPGQAPRLLIYGASSRATGIPDRFSGSGSGTDFTLTISRLEPEDFAVYYCQQYGSSP | |
| | | LTFGGGTKVEIKSGGGGSEVQLVESGGGLVQPGGSLKLSCAASGFTFNKYAMNWVRQAPGKGL | |
| | | EWVARIRSKYNNYATYYADSVKDRFTISRDDSKNTAYLQMNNLKTEDTAVYYCVRHGNFGNSY | |
| | | ISYWAYWGQGTLVTVSSGGGGSGGGGSGGGGSQTVVTQEPSLTVSPGGTVTLTCGSSTGAVTS | |
| | | GNYPNWVQQKPGQAPRGLIGGTKFLAPGTPARFSGSLLGGKAALTLSGVQPEDEAEYYCVLWY | |
| | | SNRWVFGGGTKLTVLGGGGSQRFVTGHFGGLHPANGHHHHHH | |
| 297. | CH19_0-G4xI2C6-LH-FcB- | QRFVTGHFGGLHPANGGGGGSQVQLQESGPGLVKPSQTLSLTCTVSGGSISSGGYYWSWIRQH | |
| | LH | PGKGLEWIGYIYYRGRTYYNPSLKSRVTISVDTSKNQFSLKLSSVTAADTAVYYCARVYSNYG | |
| | | WFDPWGQGTLVTVSSGGGGSGGGGSGGGGSEIVLIQSPGILSLSPGERATLSCRASQSVSSSY | |
| | | LAWYQQKPGQAPRLLIYGASTRATGIPDRFSGSGSGTDFTLTISRLEPEDFAVYYCQQYGSSP | |
| | | SFGQGTKVEIKSGGGGSEVQLVESGGGLVQPGGSLKLSCAASGFTFNKYAMNWVRQAPGKGLE | |
| | | WVARIRSKYNNYATYYADSVKDRFTISRDDSKNTAYLQMNNLKTEDTAVYYCVRHGNFGNSYI | |
| | | SYWAYWGQGTLVTVSSGGGGSGGGGSGGGGSQTVVTQEPSLTVSPGGTVTLTCGSSTGAVTSG | |
| | | NYPNWVQQKPGQAPRGLIGGTKFLAPGTPARFSGSLLGGKAALTLSGVQPEDEAEYYCVLWYS | |
| | | NRWVFGGGTKLTVLGGGGSQRFVTGHFGGLHPANGHHHHHH | |
| 298. | CH19_0-H5xI2C6-LH-FcB- | QRFVTGHFGGLHPANGGGGGSQVQLQESGPGLVRPSQTLSLTCTVSGGSISSGGYYWSWIRQH | |
| | LH | PGKGLEWIGYIYYRGRTYYNPSLKSRVTISVDTSKNQFSLKLSSVTAADTAVYYCARVYSNYG | |
| | | WFDPWGQGTLVTVSSGGGGSGGGGSGGGGSEIVLIQSPGILSLSPGERATLSCRASQSVSSSY | |
| | | LAWYQQKPGQAPRLLIYGASSRATGIPDRFSGSGSGIDFILTISRLEPEDFAVYYCQQYDTSP | |
| | | LTFGGGTKVEIKSGGGGSEVQLVESGGGLVQPGGSLKLSCAASGFTFNKYAMNWVRQAPGKGL | |
| | | EWVARIRSKYNNYATYYADSVKDRFTISRDDSKNTAYLQMNNLKTEDTAVYYCVRHGNFGNSY | |
| | | ISYWAYWGQGTLVTVSSGGGGSGGGGSGGGGSQTVVTQEPSLTVSPGGTVTLTCGSSTGAVTS | |
| | | GNYPNWVQQKPGQAPRGLIGGTKFLAPGTPARFSGSLLGGKAALTLSGVQPEDEAEYYCVLWY | |
| | | SNRWVFGGGTKLTVLGGGGSQRFVTGHFGGLHPANGHHHHHH | |
| 299. | CH19_0-B8xI2C6-LH-FcB- | QRFVTGHFGGLHPANGGGGGSQVQLQESGPGLVKPSQTLSLTCTVSGGSISSGGYYWSWIRQH | |
| | LH | PGKGLEWIGYIYYRGRTYYNPSLKSRVTISVDTSKNQFSLKLSSVTAADTAVYYCARVYSNYG | |
| | | WFDPWGQGTLVTVSSGGGGSGGGGSGGGGSEIVLIQSPGILSLSPGERATLSCRASQSVSSSY | |
| | | LAWYQQKPGQAPRLLIYGASSRATGIPDRFSGSGSGTDFTLTISRLEPEDFAVYYCQQYGSSP | |
| | | TFGGGTKVEIKSGGGGSEVQLVESGGGLVQPGGSLKLSCAASGFTFNKYAMNWVRQAPGKGLE | |
| | | WVARIRSKYNNYATYYADSVKDRFTISRDDSKNTAYLQMNNLKTEDTAVYYCVRHGNFGNSYI | |
| | | SYWAYWGQGTLVTVSSGGGGSGGGGSGGGGSQTVVTQEPSLTVSPGGTVTLTCGSSTGAVTSG | |
| | | NYPNWVQQKPGQAPRGLIGGTKFLAPGTPARFSGSLLGGKAALTLSGVQPEDEAEYYCVLWYS | |
| | | NRWVFGGGTKLTVLGGGGSQRFVTGHFGGLHPANGHHHHHH | |
| 300. | CH19_2-D9xI2C6-LH-FcB- | QRFVTGHFGGLHPANGGGGGSQVQLQESGPGLVKPSQTLSLTCTVSGGSISSGGYYWSWIRQH | |
| | LH | PGKGLEWIGYIYYRGRTYYNPSLKSRVTISVDTSKNQFSLKLSSVTAADTAVYYCARVYSNYG | |
| | | WFDPWGQGTLVTVSSGGGGSGGGGSGGGGSEIVLTQSPGTLSLSPGERATLSCRASQSVSSSY | |
| | | LAWYQQKPGQAPRLLIYGASSRATGIPDRFSGSGSGTDFTLTISRLEPEDFAVYYCQQYGSSP | |
| | | LTFGGGTKVEIKSGGGGSEVQLVESGGGLVQPGGSLKLSCAASGFTFNKYAMNWVRQAPGKGL | |
| | | EWVARIRSKYNNYATYYADSVKDRFTISRDDSKNTAYLQMNNLKTEDTAVYYCVRHGNFGNSY | |
| | | ISYWAYWGQGTLVTVSSGGGGSGGGGSGGGGSQTVVIQEPSLIVSPGGIVTLICGSSTGAVTS | |
| | | GNYPNWVQQKPGQAPRGLIGGTKFLAPGTPARFSGSLLGGKAALTLSGVQPEDEAEYYCVLWY | |
| | | SNRWVFGGGTKLTVLGGGGSQRFVTGHFGGLHPANGHHHHHH | |
| 301. | CH19_8-H7xI2C6-LH-FcB- | QRFVTGHFGGLHPANGGGGGSQVQLQESGPGLVKPSQTLSLTCTVSGGSISSGGYYWSWVRQH | |
| | LH | PGKGLEWIGYIFYSGRTYYNPSLKSRVIISVDTSKNQFSLKLSSVTAADTAVYYCARVYSNYG | |
| | | WFDPWGQGTLVTVSSGGGGSGGGGSGGGGSEIVLTQSPGTLSLSPGERATLSCRASQSVSSSY | |
| | | LAWYQQKPGQAPRLLIYGASSRATGIPDRFSGSGSGTDFTLTISRLEPEDFAVYYCQQYGSSP | |
| | | LTFGGGTKVEIKSGGGGSEVQLVESGGGLVQPGGSLKLSCAASGFTFNKYAMNWVRQAPGKGL | |
| | | EWVARIRSKYNNYATYYADSVKDRFTISRDDSKNTAYLQMNNLKTEDTAVYYCVRHGNFGNSY | |
| | | ISYWAYWGQGTLVTVSSGGGGSGGGGSGGGGSQTVVTQEPSLTVSPGGTVTLTCGSSTGAVTS | |
| | | GNYPNWVQQKPGQAPRGLIGGTKFLAPGTPARFSGSLLGGKAALTLSGVQPEDEAEYYCVLWY | |
| | | SNRWVFGGGTKLTVLGGGGSQRFVTGHFGGLHPANGHHHHHH | |
| 302. | CH19_9-C2xI2C6-LH-FcB- | QRFVTGHFGGLHPANGGGGGSQVQLQESGPGLVKPSQTLSLTCTVSGGSISSGGYYWSWIRQH | |
| | LH | PGKGLEWIGYIFYSGRTYYNPSLKSRVTISVDTSKNQFSLKLSSVTAADTAVYYCARVYSNYG | |
| | | WFDPWGQGTLVTVSSGGGGSGGGGSGGGGSEIVLTQSPGTLSLSPGERATLSCRASQSVSSSY | |
| | | LAWYQQKPGQAPRLLIYGASSRATGIPDRFSGSGSGTDFTLTISRLEPEDFAVYYCQQYGSSP | |
| | | LTFGGGTKVEIKSGGGGSEVQLVESGGGLVQPGGSLKLSCAASGFTFNKYAMNWVRQAPGKGL | |
| | | EWVARIRSKYNNYATYYADSVKDRFTISRDDSKNTAYLQMNNLKTEDTAVYYCVRHGNFGNSY | |
| | | ISYWAYWGQGTLVTVSSGGGGSGGGGSGGGGSQTVVTQEPSLTVSPGGTVTLTCGSSTGAVTS | |
| | | GNYPNWVQQKPGQAPRGLIGGTKFLAPGTPARFSGSLLGGKAALTLSGVQPEDEAEYYCVLWY | |
| | | SNRWVFGGGTKLTVLGGGGSQRFVTGHFGGLHPANGHHHHHH | |
| 303. | CH19_3-D5xI2C6-LH-FcB- | QRFVTGHFGGLHPANGGGGGSQVQLQESGPGLVKPSQTLSLTCTVSGGSISSGGYYWSWIRQH | |
| | LH | PGKGLEWIGYIFYSGRTYYNPSLKSRVSISVDTSKNQFSLKLSSVTAADTAVYYCARVYSNYG | |
| | | WFDPWGQGTLVTVSSGGGGSGGGGSGGGGSEIVLIQSPGILSLSPGERATLSCRASQSVSSSY | |
| | | LAWYQQKPGQAPRLLIYGASSRATGIPDRFSGSGSGIDFILTISRLEPEDFAVYYCQQYGSSP | |
| | | LTFGGGTKVEIKSGGGGSEVQLVESGGGLVQPGGSLKLSCAASGFTFNKYAMNWVRQAPGKGL | |
| | | EWVARIRSKYNNYATYYADSVKDRFTISRDDSKNTAYLQMNNLKTEDTAVYYCVRHGNFGNSY | |
| | | ISYWAYWGQGTLVTVSSGGGGSGGGGSGGGGSQTVVTQEPSLTVSPGGTVTLTCGSSTGAVTS | |
| | | GNYPNWVQQKPGQAPRGLIGGTKFLAPGTPARFSGSLLGGKAALTLSGVQPEDEAEYYCVLWY | |
| | | SNRWVFGGGTKLTVLGGGGSQRFVTGHFGGLHPANGHHHHHH | |
| 304. | CH19_1-G11xI2C6-LH- | QRFVTGHFGGLHPANGGGGGSQVQLQESGPGLVKPSETLSLTCTVSGGSVSSGGYYWSWIRQP | |
| | FcB-LH | PGKGLEWIGYIYYRGRTYYNPSLKSRVTISVDTSKNQFSLKLSSVTAADTAVYYCARVYSNYG | |
| | | WFDPWGQGTLVTVSSGGGGSGGGGSGGGGSEIVLIQSPGILSLSPGERATLSCRASQSVSSSY | |
| | | LAWYQQKPGQAPRLLIYGASSRATGIPDRFSGSGSGIDFILTISRLEPEDFAVYYCQQYGSSP | |
| | | LTFGGGTKVEIKSGGGGSEVQLVESGGGLVQPGGSLKLSCAASGFTFNKYAMNWVRQAPGKGL | |
| | | EWVARIRSKYNNYATYYADSVKDRFTISRDDSKNTAYLQMNNLKTEDTAVYYCVRHGNFGNSY | |
| | | ISYWAYWGQGTLVTVSSGGGGSGGGGSGGGGSQTVVTQEPSLTVSPGGTVTLTCGSSTGAVTS | |
| | | GNYPNWVQQKPGQAPRGLIGGTKFLAPGTPARFSGSLLGGKAALTLSGVQPEDEAEYYCVLWY | |
| | | SNRWVFGGGTKLTVLGGGGSQRFVTGHFGGLHPANGHHHHHH | |
| 305. | CH19_1-H11xI2C6-LH- | QRFVTGHFGGLHPANGGGGGSQVQLQESGPGLVKPSQTLSLTCTVSGGSISSGGYYWSWIRQH | |
| | FcB-LH | PGKGLEWIGYIYYRGRTYYNPSLKSRVTISVDTSKNQFSLKLSSVTAADTAVYYCARVYSNYG | |
| | | WFDPWGQGTLVTVSSGGGGSGGGGSGGGGSEIVLTQSPGTLSLSPGERATLSCRASQSVSSSY | |
| | | LAWYQQKPGQAPRLLIYGASSRATGIPDRFSGSGSGIDFILTISRLEPEDFAVYYCQQYGSSP | |
| | | TFGQGTRLEIKSGGGGSEVQLVESGGGLVQPGGSLKLSCAASGFTFNKYAMNWVRQAPGKGLE | |
| | | WVARIRSKYNNYATYYADSVKDRFTISRDDSKNTAYLQMNNLKTEDTAVYYCVRHGNFGNSYI | |
| | | SYWAYWGQGTLVTVSSGGGGSGGGGSGGGGSQTVVTQEPSLTVSPGGTVTLTCGSSTGAVTSG | |
| | | NYPNWVQQKPGQAPRGLIGGTKFLAPGTPARFSGSLLGGKAALTLSGVQPEDEAEYYCVLWYS | |
| | | NRWVFGGGTKLTVLGGGGSQRFVTGHFGGLHPANGHHHHHH | |
| 306. | CH19_9-F3xI2C6-LH-FcB- | QRFVIGHFGGLHPANGGGGGSQVQLQESGPGLVKPSQTLSLICTVSGGSISSGGYYWSWIRQH | |
| | LH | PGKGLEWIGYIFYSGKTYYNPSLKSRVSISVDTSKNQFSLKLSSVTAADTAVYYCARVYSNYG | |
| | | WFDPWGQGTLVTVSSGGGGSGGGGSGGGGSEIVLIQSPGILSLSPGERATLSCRASQSVSSSY | |
| | | LAWYQQKPGQAPRLLIYGASSRATGIPDRFSGSGSGTDFTLTISRLEPEDFAVYYCQQYGSSP | |
| | | ITFGQGTRLEIKSGGGGSEVQLVESGGGLVQPGGSLKLSCAASGFTFNKYAMNWVRQAPGKGL | |
| | | EWVARIRSKYNNYATYYADSVKDRFTISRDDSKNTAYLQMNNLKTEDTAVYYCVRHGNFGNSY | |
| | | ISYWAYWGQGTLVTVSSGGGGSGGGGSGGGGSQTVVTQEPSLTVSPGGTVTLTCGSSTGAVTS | |
| | | GNYPNWVQQKPGQAPRGLIGGTKFLAPGTPARFSGSLLGGKAALTLSGVQPEDEAEYYCVLWY | |
| | | SNRWVFGGGTKLTVLGGGGSQRFVTGHFGGLHPANGHHHHHH | |
| 307. | CH19_2-G6xI2C6-LH-FcB- | QRFVTGHFGGLHPANGGGGGSQVQLQESGPGLVKPSETLSLTCTVSGGSISSYYWSWIRQPPG | |
| | LH | KGLEWIGYIYYSGSTNYNPSLKSRVTMSIDTSKNQFSLKLISVTAADTAVYYCARDQRRIVAA | |
| | | GGYYYGMDVWGQGTIVIVSSGGGGSGGGGSGGGGSEIVLIQSPGILSLSPGERATLSCRASQS | |
| | | VSSSYLAWYQQKPGQAPRLLIYGASTRATGIPARFSGSGSGTDFTLTISRLEPEDFAVYYCQQ | |
| | | YGSSPFTFGPGTKVDIKSGGGGSEVQLVESGGGLVQPGGSLKLSCAASGFTFNKYAMNWVRQA | |
| | | PGKGLEWVARIRSKYNNYATYYADSVKDRFTISRDDSKNTAYLQMNNLKTEDTAVYYCVRHGN | |
| | | FGNSYISYWAYWGQGTLVTVSSGGGGSGGGGSGGGGSQTVVTQEPSLTVSPGGTVTLTCGSST | |
| | | GAVTSGNYPNWVQQKPGQAPRGLIGGTKFLAPGTPARFSGSLLGGKAALTLSGVQPEDEAEYY | |
| | | CVLWYSNRWVFGGGTKLTVLGGGGSQRFVTGHFGGLHPANGHHHHHH | |
| 308. | CH19_2-H7xI2C6-LH-FcB- | QRFVTGHFGGLHPANGGGGGSQVQLQESGPGLVKPSQTLSLTCTVSGGSISSNDYYWSWIRQH | |
| | LH | PGKGLEWIGYIYYSGSTFYNPSLKSRGAISVDTSKNQFSLKLTSVTAADTAVYYCARGVYRIG | |
| | | AFDIWGQGTMVTVSSGGGGSGGGGSGGGGSDIQMTQSPSSLSASVGDRVTITCRASQSISSYL | |
| | | NWYQQKPGKAPKSLIYAASSLQSGVPSKFSGSGSGTDFTLTISSLQPEDIATYYCQQSYSTPQ | |
| | | AFGGGTKVDIKSGGGGSEVQLVESGGGLVQPGGSLKLSCAASGFTFNKYAMNWVRQAPGKGLE | |
| | | WVARIRSKYNNYATYYADSVKDRFTISRDDSKNTAYLQMNNLKTEDTAVYYCVRHGNFGNSYI | |
| | | SYWAYWGQGTLVTVSSGGGGSGGGGSGGGGSQTVVTQEPSLTVSPGGTVTLTCGSSTGAVTSG | |
| | | NYPNWVQQKPGQAPRGLIGGTKFLAPGTPARFSGSLLGGKAALTLSGVQPEDEAEYYCVLWYS | |
| | | NRWVFGGGTKLTVLGGGGSQRFVTGHFGGLHPANGHHHHHH | |
| 309. | CH19_5-B3xI2C6-LH-FcB- | QRFVTGHFGGLHPANGGGGGSQVQLVQSGAEVKKPGASVKVSCKASGYTFTYYGISWVRQAPG | |
| | LH | QGLEWMGWINPYGGETNYAQKLQGRVTMTIDTSTSTAYMELRSLRSDDTAVYYCARGSGGFDY | |
| | | WGQGTLVTVSSGGGGSGGGGSGGGGSDIVMTQTPLSLSVTPGEPASISCRSSQSLLHSNGYNY | |
| | | LDWYLQKPGQSPQLLIYLGSYRASGVPDRFSGSGSGIDFTLKISRVEAEDVGVYYCMQALQTP | |
| | | FTFGPGTKVDIKSGGGGSEVQLVESGGGLVQPGGSLKLSCAASGFTFNKYAMNWVRQAPGKGL | |
| | | EWVARIRSKYNNYATYYADSVKDRFTISRDDSKNTAYLQMNNLKTEDTAVYYCVRHGNFGNSY | |
| | | ISYWAYWGQGTLVTVSSGGGGSGGGGSGGGGSQTVVTQEPSLTVSPGGTVTLTCGSSTGAVTS | |
| | | GNYPNWVQQKPGQAPRGLIGGTKFLAPGTPARFSGSLLGGKAALTLSGVQPEDEAEYYCVLWY | |
| | | SNRWVFGGGTKLTVLGGGGSQRFVTGHFGGLHPANGHHHHHH | |
| 310. | CH19_5-E10xI2C6-LH- | QRFVTGHFGGLHPANGGGGGSQVQLVQSGAEVKKPGASVKVSCKASGYTFTYYGISWVRQAPG | |
| | FcB-LH | QGLEWMGWINPYSGATNYAQKLQGRVIMITDTSTSTAYMELRSLRSDDTAVYYCARGSGGFDY | |
| | | WGQGTLVTVSSGGGGSGGGGSGGGGSDIVMTQTPLSLSVTPGEPASISCRSSQSLLHSNGYNY | |
| | | LDWYLQKPGQSPQLLIYLGSYRASGVPDRFSGSGSGIDFTLKISRVEAEDVGVYYCMQALQTP | |
| | | FTFGPGTKVDIKSGGGGSEVQLVESGGGLVQPGGSLKLSCAASGFTFNKYAMNWVRQAPGKGL | |
| | | EWVARIRSKYNNYATYYADSVKDRFTISRDDSKNTAYLQMNNLKTEDTAVYYCVRHGNFGNSY | |
| | | ISYWAYWGQGTLVTVSSGGGGSGGGGSGGGGSQTVVIQEPSLIVSPGGIVTLICGSSIGAVIS | |
| | | GNYPNWVQQKPGQAPRGLIGGTKFLAPGTPARFSGSLLGGKAALTLSGVQPEDEAEYYCVLWY | |
| | | SNRWVFGGGTKLTVLGGGGSQRFVTGHFGGLHPANGHHHHHH | |
| 311. | CH19_6-G10xI2C6-LH- | QRFVTGHFGGLHPANGGGGGSQVQLVQSGAEVKKPGASVKVSCKASGYTFTYYGISWVRQAPG | |
| | FcB-LH | QGLEWMGWINPYIGKTNYAQKLQGRVIMITDTSTSTAYMELRSLRSDDTAVYYCARGSGGFDY | |
| | | WGQGILVTVSSGGGGSGGGGSGGGGSDIVMTQTPLSLSVTPGEPASISCRSSQSLLHSNGYNY | |
| | | LDWYLQKPGQSPQLLIYLGSYRASGVPDRFSGSGSGTDFTLKISRVEAEDVGVYYCMQALQTP | |
| | | FTFGPGTKVDIKSGGGGSEVQLVESGGGLVQPGGSLKLSCAASGFTFNKYAMNWVRQAPGKGL | |
| | | EWVARIRSKYNNYATYYADSVKDRFTISRDDSKNTAYLQMNNLKTEDTAVYYCVRHGNFGNSY | |
| | | ISYWAYWGQGTLVTVSSGGGGSGGGGSGGGGSQTVVIQEPSLIVSPGGIVTLICGSSIGAVIS | |
| | | GNYPNWVQQKPGQAPRGLIGGTKFLAPGTPARFSGSLLGGKAALTLSGVQPEDEAEYYCVLWY | |
| | | SNRWVFGGGTKLTVLGGGGSQRFVTGHFGGLHPANGHHHHHH | |
| 312. | CH19_4-H8xI2C6-LH-FcB- | QRFVTGHFGGLHPANGGGGGSQVQLVQSGAEVKKPGASVKVSCKASGYTFTYYGISWVRQAPG | |
| | LH | QGLEWMGWINPYTGKTNYAQKLQGRVTMTTDTSTSTAYMELRSLRSDDTAVYYCARGSGGFDY | |
| | | WGQGILVTVSSGGGGSGGGGSGGGGSDIVMTQTPLSLSVTPGEPASISCRSSQSLLHSVGYNY | |
| | | LDWYLQKPGQSPQLLIYLGSYRASGVPDRFSGSGSGIDFTLKISRVEAEDVGVYYCMQALQIP | |
| | | FTFGPGTKVDIKSGGGGSEVQLVESGGGLVQPGGSLKLSCAASGFTFNKYAMNWVRQAPGKGL | |
| | | EWVARIRSKYNNYATYYADSVKDRFTISRDDSKNTAYLQMNNLKTEDTAVYYCVRHGNFGNSY | |
| | | ISYWAYWGQGTLVTVSSGGGGSGGGGSGGGGSQTVVTQEPSLTVSPGGTVTLTCGSSTGAVTS | |
| | | GNYPNWVQQKPGQAPRGLIGGTKFLAPGTPARFSGSLLGGKAALTLSGVQPEDEAEYYCVLWY | |
| | | SNRWVFGGGTKLTVLGGGGSQRFVTGHFGGLHPANGHHHHHH | |
| 313. | CH19_2-E4xI2C6-LH-FcB- | QRFVTGHFGGLHPANGGGGGSQVQLVQSGAEVKKPGASVKVSCKASGYTFTSYGISWVRQAPG | |
| | LH | QGLEWMGWINPYTGNRNYAQKVQDRVTMTTDTSTNTAYMELSSLRSDDTAVYYCARGSGGFDY | |
| | | WGQGTLVTVSSGGGGSGGGGSGGGGSDIVMTQSPLSLPVTLGQPASISCRSSQSLLHSVGYNY | |
| | | LDWYLQKPGQSPQLLIYLGSNRASGVPDRFSGSGSGTDFTLKISRVEAEDVGVYYCMQALQTP | |
| | | FTFGPGTKLEIKSGGGGSEVQLVESGGGLVQPGGSLKLSCAASGFTFNKYAMNWVRQAPGKGL | |
| | | EWVARIRSKYNNYATYYADSVKDRFTISRDDSKNTAYLQMNNLKTEDTAVYYCVRHGNFGNSY | |
| | | ISYWAYWGQGTLVTVSSGGGGSGGGGSGGGGSQTVVTQEPSLTVSPGGTVTLTCGSSTGAVTS | |
| | | GNYPNWVQQKPGQAPRGLIGGTKFLAPGTPARFSGSLLGGKAALTLSGVQPEDEAEYYCVLWY | |
| | | SNRWVFGGGTKLTVLGGGGSQRFVTGHFGGLHPANGHHHHHH | |
| 314. | CH19_6-B8xI2C6-LH-FcB- | QRFVIGHFGGLHPANGGGGGSQVQLVQSGAEVKKPGASVKVSCKASGYTFTYYGISWVRQAPG | |
| | LH | QGLEWMGWINPYTGKTNYAQKLQDRVTMTTDTSTNTAYMELRSLRSDDTAVYYCARGSGGFDY | |
| | | WGQGTLVTVSSGGGGSGGGGSGGGGSDIVMTQTPLSLPVTPGEPASISCRSSQSLLHSVGYNY | |
| | | LDWYLQKPGQSPQLLIYLGSNRASGVPDRFSGSGSGIDFTLKISRVEAEDVGVYYCMQALQIP | |
| | | FTFGPGTKVDIKSGGGGSEVQLVESGGGLVQPGGSLKLSCAASGFTFNKYAMNWVRQAPGKGL | |
| | | EWVARIRSKYNNYATYYADSVKDRFTISRDDSKNTAYLQMNNLKTEDTAVYYCVRHGNFGNSY | |
| | | ISYWAYWGQGTLVTVSSGGGGSGGGGSGGGGSQTVVTQEPSLTVSPGGTVTLTCGSSTGAVTS | |
| | | GNYPNWVQQKPGQAPRGLIGGTKFLAPGTPARFSGSLLGGKAALTLSGVQPEDEAEYYCVLWY | |
| | | SNRWVFGGGTKLTVLGGGGSQRFVTGHFGGLHPANGHHHHHH | |
| 315. | CH19_0-B4xI2C6-LH-FcB- | QRFVTGHFGGLHPANGGGGGSQVQLVQSGAEVKKPGASVKVSCKASGYTFTTYGISWVRQAPG | |
| | LH | QGLEWMGWINPYIGKTNYAQKLQGRVIMATDTSTSTAYMELRSLRSDDTAVYYCARGSGGFDY | |
| | | WGQGTLVTVSSGGGGSGGGGSGGGGSDIVMTQSPLSLPVTPGEPASISCRSSQSLLHSVGYNY | |
| | | LDWYLQKPGQSPQLLIYLGSNRASGVPDRFSGSGSGIDFTLKISRVEAEDVGVYYCMQALQIP | |
| | | FTFGPGTKLEIKSGGGGSEVQLVESGGGLVQPGGSLKLSCAASGFTFNKYAMNWVRQAPGKGL | |
| | | EWVARIRSKYNNYATYYADSVKDRFTISRDDSKNTAYLQMNNLKTEDTAVYYCVRHGNFGNSY | |
| | | ISYWAYWGQGTLVTVSSGGGGSGGGGSGGGGSQTVVTQEPSLTVSPGGTVTLTCGSSTGAVTS | |
| | | GNYPNWVQQKPGQAPRGLIGGTKFLAPGTPARFSGSLLGGKAALTLSGVQPEDEAEYYCVLWY | |
| | | SNRWVFGGGTKLTVLGGGGSQRFVTGHFGGLHPANGHHHHHH | |
| 316. | CH19_9-F1xI2C6-LH-FcB- | QRFVIGHFGGLHPANGGGGGSQVQLVQSGAEVKEPGASVKVSCKASGYTFTYYGISWVRQAPG | |
| | LH | QGLEWMGWINPYTGNRNYAQKVQDRVTMTTDTSTNTAYMELRSLRSDDTAVYYCARGSGGFDY | |
| | | WGQGTLVTVSSGGGGSGGGGSGGGGSDIVMTQSPLSLPVTPGEPASISCRSSQSLLHSVGYNY | |
| | | LDWYLQKPGQSPQLLIYLGSNRASGVPDRFSGSGSGIDFTLKISRVEAEDVGVYYCMQALQIP | |
| | | FTFGPGTKLEIKSGGGGSEVQLVESGGGLVQPGGSLKLSCAASGFTFNKYAMNWVRQAPGKGL | |
| | | EWVARIRSKYNNYATYYADSVKDRFTISRDDSKNTAYLQMNNLKTEDTAVYYCVRHGNFGNSY | |
| | | ISYWAYWGQGTLVTVSSGGGGSGGGGSGGGGSQTVVIQEPSLIVSPGGIVTLICGSSIGAVIS | |
| | | GNYPNWVQQKPGQAPRGLIGGTKFLAPGTPARFSGSLLGGKAALTLSGVQPEDEAEYYCVLWY | |
| | | SNRWVFGGGTKLTVLGGGGSQRFVTGHFGGLHPANGHHHHHH | |
| 317. | CH19_4-A7xI2C6-LH-FcB- | QRFVTGHFGGLHPANGGGGGSQVQLVQSGAEVKKPGASVKVSCKASGYTFTYYGISWVRQAPG | |
| | LH | QGLEWMGWINPYTGKTNYAQKLQGRVTMTTDTSTSTAYMELRSLRSDDTAVYYCARGSGGFDY | |
| | | WGQGTLVTVSSGGGGSGGGGSGGGGSDIVMTQSPLSLPVTPGEPASISCRSSQSLLHSVGYNY | |
| | | LDWYLQKPGQSPQLLIYLGSNRASGVPDRFSGSGSGTDFTLKISRVEAEDVGVYYCMQALQTP | |
| | | FTFGPGTKVEIKSGGGGSEVQLVESGGGLVQPGGSLKLSCAASGFTFNKYAMNWVRQAPGKGL | |
| | | EWVARIRSKYNNYATYYADSVKDRFTISRDDSKNTAYLQMNNLKTEDTAVYYCVRHGNFGNSY | |
| | | ISYWAYWGQGTLVTVSSGGGGSGGGGSGGGGSQTVVTQEPSLTVSPGGTVTLTCGSSTGAVTS | |
| | | GNYPNWVQQKPGQAPRGLIGGTKFLAPGTPARFSGSLLGGKAALTLSGVQPEDEAEYYCVLWY | |
| | | SNRWVFGGGTKLTVLGGGGSQRFVTGHFGGLHPANGHHHHHH | |
| 318. | CH19_6-E12xI2C6-LH- | QRFVTGHFGGLHPANGGGGGSQVQLVQSGAEVKKPGASVKVSCKASGYTFTSYGITWVRQAPG | |
| | FcB-LH | QGLEWMGWINPYTGNRNYAQKVQGRVTMTTDTSTSTAYMELRSLRSDDTAVYYCARGSGGFDY | |
| | | WGQGTLVTVSSGGGGSGGGGSGGGGSDIVMTQSPLSLSVTPGEPASISCRSSQSLLHSVGYNY | |
| | | LDWYLQKPGQSPQLLIYLGSNRASGVPDRFSGSGSGTDFTLKISRVEAEDVGVYYCMQALQTP | |
| | | FTFGPGTKVDIKSGGGGSEVQLVESGGGLVQPGGSLKLSCAASGFTFNKYAMNWVRQAPGKGL | |
| | | EWVARIRSKYNNYATYYADSVKDRFTISRDDSKNTAYLQMNNLKTEDTAVYYCVRHGNFGNSY | |
| | | ISYWAYWGQGTLVTVSSGGGGSGGGGSGGGGSQTVVTQEPSLTVSPGGTVTLTCGSSTGAVTS | |
| | | GNYPNWVQQKPGQAPRGLIGGTKFLAPGTPARFSGSLLGGKAALTLSGVQPEDEAEYYCVLWY | |
| | | SNRWVFGGGTKLTVLGGGGSQRFVTGHFGGLHPANGHHHHHH | |
| 319. | CH19_6-C12xI2C6-LH- | QRFVTGHFGGLHPANGGGGGSQVQLVQSGAEVKKPGASVKVSCKASGYTFTSYGISWVRQAPG | |
| | FcB-LH | QGLEWMGWINPYTGNRNYAQKFQGRVTMTTDTSTNTAYMELSSLRSEDTAVYYCARGSGGFDY | |
| | | WGQGTLVTVSSGGGGSGGGGSGGGGSDIVMTQSPLSLPVTPGEPASISCRSSQSLLHSVGYNY | |
| | | LDWYLQKPGQSPQLLIYLGSNRASGVPDRFSGSGSGTDFTLKISRVEAEDVGVYYCMQALQTP | |
| | | FTFGPGTKVDIKSGGGGSEVQLVESGGGLVQPGGSLKLSCAASGFTFNKYAMNWVRQAPGKGL | |
| | | EWVARIRSKYNNYATYYADSVKDRFTISRDDSKNTAYLQMNNLKTEDTAVYYCVRHGNFGNSY | |
| | | ISYWAYWGQGTLVTVSSGGGGSGGGGSGGGGSQTVVTQEPSLTVSPGGTVTLTCGSSTGAVTS | |
| | | GNYPNWVQQKPGQAPRGLIGGTKFLAPGTPARFSGSLLGGKAALTLSGVQPEDEAEYYCVLWY | |
| | | SNRWVFGGGTKLTVLGGGGSQRFVTGHFGGLHPANGHHHHHH | |
| 320. | CH19_6-A7xI2C6-LH-FcB- | QRFVTGHFGGLHPANGGGGGSQVQLVQSGAEVKKPGASVKVSCKASGYSFTSYGISWVRQAPG | |
| | LH | QGLEWMGWINPYTGNRNYAQKVQGRVTMTTDTSTSTAYMELRSLRSDDTAVYYCARGSGGFDY | |
| | | WGQGTLVTVSSGGGGSGGGGSGGGGSDIVMTQSPLSLPVTPGEPASISCRSSQSLLHSVGYNY | |
| | | LDWYLQKPGQSPQLLIYLGSNRASGVPDRFSGSGSGIDFTLKISRVEAEDVGVYYCMQALQTP | |
| | | FTFGPGTKVEIKSGGGGSEVQLVESGGGLVQPGGSLKLSCAASGFTFNKYAMNWVRQAPGKGL | |
| | | EWVARIRSKYNNYATYYADSVKDRFTISRDDSKNTAYLQMNNLKTEDTAVYYCVRHGNFGNSY | |
| | | ISYWAYWGQGTLVTVSSGGGGSGGGGSGGGGSQTVVTQEPSLTVSPGGTVTLTCGSSTGAVTS | |
| | | GNYPNWVQQKPGQAPRGLIGGTKFLAPGTPARFSGSLLGGKAALTLSGVQPEDEAEYYCVLWY | |
| | | SNRWVFGGGTKLTVLGGGGSQRFVTGHFGGLHPANGHHHHHH | |
| 321. | CH19_6-G8xI2C6-LH-FcB- | QRFVTGHFGGLHPANGGGGGSQVQLVQSGAEVKKPGASVKVSCKASGYTFTYYGISWVRQAPG | |
| | LH | QGLEWMGWINPYIGKTNYAQKVQGRVIMITDTSTSTAYMELRNLRSDDTAVYYCARGSGGFDY | |
| | | WGQGTLVTVSSGGGGSGGGGSGGGGSDIVMTQTPLSLSVTPGQPASISCRSSQSLLHSVGYNY | |
| | | LDWYLQKPGQSPQLLIYLGSNRASGVPDRFSGSGSGIDFTLKISRVEAEDVGVYYCMQALQTP | |
| | | FTFGPGTKVDIKSGGGGSEVQLVESGGGLVQPGGSLKLSCAASGFTFNKYAMNWVRQAPGKGL | |
| | | EWVARIRSKYNNYATYYADSVKDRFTISRDDSKNTAYLQMNNLKTEDTAVYYCVRHGNFGNSY | |
| | | ISYWAYWGQGTLVTVSSGGGGSGGGGSGGGGSQTVVIQEPSLIVSPGGIVTLICGSSTGAVIS | |
| | | GNYPNWVQQKPGQAPRGLIGGTKFLAPGTPARFSGSLLGGKAALTLSGVQPEDEAEYYCVLWY | |
| | | SNRWVFGGGTKLTVLGGGGSQRFVTGHFGGLHPANGHHHHHH | |
| 322. | CH19_6-F9xI2C6-LH-FcB- | QRFVTGHFGGLHPANGGGGGSQVQLVQSGAEVKKPGASVKVSCKASGYTFTYYGISWVRQAPG | |
| | LH | QGLEWMGWINPYIGKTNYAQKLQGRVIMITDTSTSTAYMELRSLRSDDTAVYYCARGSGGFDY | |
| | | WGQGTLVTVSSGGGGSGGGGSGGGGSDIVMTQTPLSLSVTPGQPASISCRSSQSLLHSVGYNY | |
| | | LDWYLQKPGQSPQLLIYLGSNRASGVPDRFSGSGSGTDFTLKISRVEAEDVGVYYCMQALQTP | |
| | | FTFGPGTKVDIKSGGGGSEVQLVESGGGLVQPGGSLKLSCAASGFTFNKYAMNWVRQAPGKGL | |
| | | EWVARIRSKYNNYATYYADSVKDRFTISRDDSKNTAYLQMNNLKTEDTAVYYCVRHGNFGNSY | |
| | | ISYWAYWGQGTLVTVSSGGGGSGGGGSGGGGSQTVVIQEPSLIVSPGGIVTLICGSSTGAVIS | |
| | | GNYPNWVQQKPGQAPRGLIGGTKFLAPGTPARFSGSLLGGKAALTLSGVQPEDEAEYYCVLWY | |
| | | SNRWVFGGGTKLTVLGGGGSQRFVTGHFGGLHPANGHHHHHH | |
| 323. | CH19_0-C11xI2C6-LH- | QRFVTGHFGGLHPANGGGGGSQVQLVESGGGVVQPGRSLRLSCAASGFTFRNYAMHWVRQAPG | |
| | FcB-LH | KGLEWVAVISYSGNNKYYASSVKGRFTISRDNSKNTLYLQLNSLRAEDTAVYYCAREFYYDST | |
| | | GYDYSTPGDYWGQGTLVTVSSGGGGSGGGGSGGGGSDIQMTQSPSSLSASVGDRVTITCQASQ | |
| | | DISNYLNWYQQKPGKAPKLLIYDASNLETGVPSRFSGSGSGTDFTFTISSLQPEDIATYYCQQ | |
| | | YDNLPTFGQGTRLEIKSGGGGSEVQLVESGGGLVQPGGSLKLSCAASGFTFNKYAMNWVRQAP | |
| | | GKGLEWVARIRSKYNNYATYYADSVKDRFTISRDDSKNTAYLQMNNLKTEDTAVYYCVRHGNF | |
| | | GNSYISYWAYWGQGTLVTVSSGGGGSGGGGSGGGGSQTVVTQEPSLTVSPGGTVTLTCGSSTG | |
| | | AVTSGNYPNWVQQKPGQAPRGLIGGTKFLAPGTPARFSGSLLGGKAALTLSGVQPEDEAEYYC | |
| | | VLWYSNRWVEGGGTKLTVLGGGGSQRFVTGHFGGLHPANGHHHHHH | |
| 324. | CH19_8-F6xI2C6-LH-FcB- | QRFVTGHFGGLHPANGGGGGSQVQLVESGGGVVQPGRSLRLSCVASGFTFRNYAMHWVRQAPG | |
| | LH | KGLEWVAVISYSGNNKYYASSVKGRFTISRDNSKNTLYLQLNSLRAEDTAVYYCAREFYYDST | |
| | | GYDYSTPGDYWGQGTLVTVSSGGGGSGGGGSGGGGSDIQMTQSPSSLSASVGDRVTITCRASQ | |
| | | SISSYLNWYQQKPGKAPKLLIYDASSLQSGVPSRFSGSGSGTEFILTISSLQAEDVAVYYCQQ | |
| | | YYSTPLIFGGGTKVDIKSGGGGSEVQLVESGGGLVQPGGSLKLSCAASGFTFNKYAMNWVRQA | |
| | | PGKGLEWVARIRSKYNNYATYYADSVKDRFTISRDDSKNTAYLQMNNLKTEDTAVYYCVRHGN | |
| | | FGNSYISYWAYWGQGTLVTVSSGGGGSGGGGSGGGGSQTVVTQEPSLTVSPGGTVTLTCGSST | |
| | | GAVTSGNYPNWVQQKPGQAPRGLIGGTKFLAPGTPARFSGSLLGGKAALTLSGVQPEDEAEYY | |
| | | CVLWYSNRWVFGGGTKLTVLGGGGSQRFVTGHFGGLHPANGHHHHHH | |
| 325. | CH19_0-G9xI2C6-LH-FcB- | QRFVTGHFGGLHPANGGGGGSQVQLVESGGGVVQPGRSLRLSCAASGFTFRNYAMHWVRQAPG | |
| | LH | KGLEWVAGISYSGTNKYYASSVKGRFTISRDNSKNTLYLQLNSLRAEDTAVYYCAREFYYDST | |
| | | GYDYSTPGDYWGQGTLVTVSSGGGGSGGGGSGGGGSDIQMTQSPSSLSASVGDRVTITCQASQ | |
| | | DISNYLNWYQQKPGKAPKLLIYDASNLETGVPSRFSGSGSGTEFTLTISSLQPEDIATYYCQQ | |
| | | YDNLPLTFGGGTKVDIKSGGGGSEVQLVESGGGLVQPGGSLKLSCAASGFTFNKYAMNWVRQA | |
| | | PGKGLEWVARIRSKYNNYATYYADSVKDRFTISRDDSKNTAYLQMNNLKTEDTAVYYCVRHGN | |
| | | FGNSYISYWAYWGQGTLVTVSSGGGGSGGGGSGGGGSQTVVTQEPSLTVSPGGTVTLTCGSST | |
| | | GAVTSGNYPNWVQQKPGQAPRGLIGGTKFLAPGTPARFSGSLLGGKAALTLSGVQPEDEAEYY | |
| | | CVLWYSNRWVFGGGTKLTVLGGGGSQRFVTGHFGGLHPANGHHHHHH | |
| 326. | CH19_1-E11xI2C6-LH- | QRFVTGHFGGLHPANGGGGGSQVQLVESGGGVVQPGRSLRLSCVASGFTFRNYAMHWVRQAPG | |
| | FcB-LH | KGLEWVAVISYSGNNKYYASSVKGRFTISRDNSKNTLFLQLNSLRAEDTAVYYCAREFYYDST | |
| | | GYDYSTPGNYWGQGTLVTVSSGGGGSGGGGSGGGGSDIQMTQSPSSLSASVGDRVTITCQASQ | |
| | | DISNYLNWYQQKPGKAPKLLIYDASNLETGVPSRFSGSGSGTDFIFTISSLQPEDIATYYCQQ | |
| | | YVNLPLTFGGGTKLEIKSGGGGSEVQLVESGGGLVQPGGSLKLSCAASGFTFNKYAMNWVRQA | |
| | | PGKGLEWVARIRSKYNNYATYYADSVKDRFTISRDDSKNTAYLQMNNLKTEDTAVYYCVRHGN | |
| | | FGNSYISYWAYWGQGTLVTVSSGGGGSGGGGSGGGGSQTVVTQEPSLTVSPGGTVTLTCGSST | |
| | | GAVTSGNYPNWVQQKPGQAPRGLIGGTKFLAPGTPARFSGSLLGGKAALTLSGVQPEDEAEYY | |
| | | CVLWYSNRWVFGGGTKLTVLGGGGSQRFVTGHFGGLHPANGHHHHHH | |
| 327. | CH19_0-F5xI2C6-LH-FcB- | QRFVTGHFGGLHPANGGGGGSQVQLVESGGGVVQPGRSLRLSCAASGFTFSSYGMQWVRQAPG | |
| | LH | KGLEWVAVIWYSGSNKYYASSVKGRFTISRDNSKNTLYLQMNSLRAEDTAVYYCARDGYPIFY | |
| | | RYYGMDVWGQGTTVTVSSGGGGSGGGGSGGGGSDIQMTQSPSSLSASVGDRVTITCRASQGIS | |
| | | NYLAWYQQKPGKVPKLLIYAASTLQSGVPSRFSGSGSGTDFTLTISSLQPEDVATYYCQKYNS | |
| | | APLTFGGGTKVEIKSGGGGSEVQLVESGGGLVQPGGSLKLSCAASGFTFNKYAMNWVRQAPGK | |
| | | GLEWVARIRSKYNNYATYYADSVKDRFTISRDDSKNTAYLQMNNLKTEDTAVYYCVRHGNFGN | |
| | | SYISYWAYWGQGTLVTVSSGGGGSGGGGSGGGGSQTVVTQEPSLTVSPGGTVTLTCGSSTGAV | |
| | | TSGNYPNWVQQKPGQAPRGLIGGTKFLAPGTPARFSGSLLGGKAALTLSGVQPEDEAEYYCVL | |
| | | WYSNRWVFGGGTKLTVLGGGGSQRFVTGHFGGLHPANGHHHHHH | |
| 328. | CH19_1-E1xI2C6-LH-FcB- | QRFVTGHFGGLHPANGGGGGSQVQLVESGGGVVQPGRSLRLSCAASGFTFSSYGMHWVRQAPG | |
| | LH | KGLEWVAVISYSGSNKYYASSVKGRFTISRDNSKNTLYLQMNSLRAEDTAVYYCARDGYPIFY | |
| | | RYYGMDVWGQGTIVIVSSGGGGSGGGGSGGGGSEIVLIQSPGILSLSPGERAILSCRASQSVS | |
| | | SSYLAWYQQKPGQAPRLLIYGASSRATGIPDRFSGSGSGTDFTLTISRLEPEDLAVYYCQQYG | |
| | | TSPLTFGGGTKLEIKSGGGGSEVQLVESGGGLVQPGGSLKLSCAASGFTFNKYAMNWVRQAPG | |
| | | KGLEWVARIRSKYNNYATYYADSVKDRFTISRDDSKNTAYLQMNNLKTEDTAVYYCVRHGNFG | |
| | | NSYISYWAYWGQGTLVTVSSGGGGSGGGGSGGGGSQTVVTQEPSLTVSPGGIVTLICGSSTGA | |
| | | VTSGNYPNWVQQKPGQAPRGLIGGTKFLAPGTPARFSGSLLGGKAALTLSGVQPEDEAEYYCV | |
| | | LWYSNRWVFGGGTKLTVLGGGGSQRFVTGHFGGLHPANGHHHHHH | |
| 329. | CH19_1-E6xI2C6-LH-FcB- | QRFVTGHFGGLHPANGGGGGSQVQLVESGGGVVQPGRSLRLSCAASGFTFSSFGMHWVRQAPG | |
| | LH | KGLEWVAFIWYSGSNKYYASSVKGRVTISRDNSKNTLYLQMNSLRAEDTAVYYCARDGYPIFY | |
| | | YYYGMDVWGQGTIVIVSSGGGGSGGGGSGGGGSEIVLIQSPGILSLSPGERAILSCRASQSVS | |
| | | SSYLAWYQQKPGQAPRLLIYGASSRATGIPDRFSGSGSGTDFTLTISRLEPEDFAVYYCQQYG | |
| | | SSPFTFGPGTRLEIKSGGGGSEVQLVESGGGLVQPGGSLKLSCAASGFTFNKYAMNWVRQAPG | |
| | | KGLEWVARIRSKYNNYATYYADSVKDRFTISRDDSKNTAYLQMNNLKTEDTAVYYCVRHGNFG | |
| | | NSYISYWAYWGQGTLVTVSSGGGGSGGGGSGGGGSQTVVTQEPSLTVSPGGTVTLTCGSSTGA | |
| | | VTSGNYPNWVQQKPGQAPRGLIGGTKFLAPGTPARFSGSLLGGKAALTLSGVQPEDEAEYYCV | |
| | | LWYSNRWVEGGGIKLTVLGGGGSQRFVTGHFGGLHPANGHHHHHH | |
| 330. | CH19_2G6_302_VKGxI2C6- | QRFVTGHFGGLYPANGGGGGSQVQLVESGGGVVQPGGSLRLSCAASGFTFSSYGMHWVRQAPG | |
| | LY-FcB-LH | KGLEWVAFIWYDGSNKYYADSVKGRFTISRDNSKNTLYLQMNSLRAEDTAVYYCARRAGIIGT | |
| | | IGYYYGMDVWGQGTTVTVSSGGGGSGGGGSGGGGSSYELTQPPSVSVSPGQTASITCSGDRLG | |
| | | EKYTSWYQQRPGQSPLLVIYQDTKRPSGIPERFSGSNSGNTATLTISGTQAMDEADYYCQAWE | |
| | | SSTVVFGGGTKLTVLSGGGGSEVQLVESGGGLVQPGGSLKLSCAASGFTFNKYAMNWVRQAPG | |
| | | KGLEWVARIRSKYNNYATYYADSVKDRFTISRDDSKNTAYLQMNNLKTEDTAVYYCVRHGNFG | |
| | | NSYISYWAYWGQGTLVTVSSGGGGSGGGGSGGGGSQTVVTQEPSLTVSPGGIVTLICGSSTGA | |
| | | VTSGNYPNWVQQKPGQAPRGLIGGTKFLAPGTPARFSGSLLGGKAALTLSGVQPEDEAEYYCV | |
| | | LWYSNRWVFGGGTKLTVLGGGGSQRFVTGHFGGLHPANGHHHHHH | |
| 331. | CH19_0-E11xI2C6-LY- | QRFVTGHFGGLYPANGGGGGSQVQLQESGPGLVKPSQTLSLTCTVSGGSISRGGYYWSWIRQH | |
| | FcB-LH | PGKGLEWIGYIFYRGRTYYNPSLKSRVTISVDTSKNQFSLKLSSVTAADTAVYYCARVNSNYG | |
| | | WFDPWGQGTLVTVSSGGGGSGGGGSGGGGSEIVLTQFPGTLSLSPGERATLSCRASQSVSSSY | |
| | | LAWYQQKPGQAPRLLIYGASSRATGIPDRFSGSGSGIDFILTISRLEPEDFAVYYCQQYGSSP | |
| | | LTFGGGTKLEIKSGGGGSEVQLVESGGGLVQPGGSLKLSCAASGFTFNKYAMNWVRQAPGKGL | |
| | | EWVARIRSKYNNYATYYADSVKDRFTISRDDSKNTAYLQMNNLKTEDTAVYYCVRHGNFGNSY | |
| | | ISYWAYWGQGTLVTVSSGGGGSGGGGSGGGGSQTVVTQEPSLTVSPGGTVTLTCGSSTGAVTS | |
| | | GNYPNWVQQKPGQAPRGLIGGTKFLAPGTPARFSGSLLGGKAALTLSGVQPEDEAEYYCVLWY | |
| | | SNRWVFGGGTKLTVLGGGGSQRFVTGHFGGLHPANGHHHHHH | |
| 332. | CH19_5-G4xI2C6-LY-FcB- | QRFVTGHFGGLYPANGGGGGSQVQLQESGPGLVKPSQTLSLTCTVSGGSISSGGYYWSWIRQH | |
| | LH | PGKGLEWIGYIFYRGRTYYNPSLKSRVTISVDTSKNQFSLKLSSVTAADTAVYYCARVYSNYG | |
| | | WFDPWGQGTLVTVSSGGGGSGGGGSGGGGSEIVLTQSPGTLSLSPGERATLSCRASQSVSSSY | |
| | | LAWYQQKPGQAPRLLIYGTSNRATGIPDRFSGSGSGTDFTLTISRLEPEDFAVYYCQQYGSSP | |
| | | LTFGGGTKLEIKSGGGGSEVQLVESGGGLVQPGGSLKLSCAASGFTFNKYAMNWVRQAPGKGL | |
| | | EWVARIRSKYNNYATYYADSVKDRFTISRDDSKNTAYLQMNNLKTEDTAVYYCVRHGNFGNSY | |
| | | ISYWAYWGQGTLVTVSSGGGGSGGGGSGGGGSQTVVIQEPSLIVSPGGIVTLICGSSTGAVIS | |
| | | GNYPNWVQQKPGQAPRGLIGGTKFLAPGTPARFSGSLLGGKAALTLSGVQPEDEAEYYCVLWY | |
| | | SNRWVFGGGTKLTVLGGGGSQRFVTGHFGGLHPANGHHHHHH | |
| 333. | CH19_8-H6xI2C6-LY-FcB- | QRFVTGHFGGLYPANGGGGGSQVQLQESGPGLVKPSQTLSLTCTVSGGSISSGGYYWSWIRQH | |
| | LH | PGKGLEWIGYIFYSGRTYYNPSLKSRVTISVDTSKNQFSLKLSSVTAADTAVYYCARVYSNYG | |
| | | WFDPWGQGTLVTVSSGGGGSGGGGSGGGGSEIVLIQSPGILSLSPGERATLSCRASQSVSSSY | |
| | | LAWYQQKPGQAPRLLIYGASSRATGIPDRFSGSGSGTDFTLTISRLEPEDFAVYYCQQYGSSP | |
| | | LTFGGGTKLEIKSGGGGSEVQLVESGGGLVQPGGSLKLSCAASGFTFNKYAMNWVRQAPGKGL | |
| | | EWVARIRSKYNNYATYYADSVKDRFTISRDDSKNTAYLQMNNLKTEDTAVYYCVRHGNFGNSY | |
| | | ISYWAYWGQGTLVTVSSGGGGSGGGGSGGGGSQTVVIQEPSLIVSPGGIVTLICGSSTGAVIS | |
| | | GNYPNWVQQKPGQAPRGLIGGTKFLAPGTPARFSGSLLGGKAALTLSGVQPEDEAEYYCVLWY | |
| | | SNRWVFGGGTKLTVLGGGGSQRFVTGHFGGLHPANGHHHHHH | |
| 334. | CH19_2-C11xI2C6-LY- | QRFVTGHFGGLYPANGGGGGSQVQLQESGPGLVKPSQTLSLTCTVSGGSISSGGYYWSWIRQH | |
| | FcB-LH | PGKGLEWIGYIFYSGRTYYNPSLKSRVTISVDTSKNQFSLKLRSVTAADTAVYYCARVYSNYG | |
| | | WFDPWGQGTLVTVSSGGGGSGGGGSGGGGSEIVLIQSPGILSLSPGERATLSCRASQSVSSSY | |
| | | LAWYQQKPGQAPRLLIYGASSRATGIPDRFSGSGSGTDFTLTISRLEPEDFAVYYCQQYGSSP | |
| | | LTFGGGTKLEIKSGGGGSEVQLVESGGGLVQPGGSLKLSCAASGFTFNKYAMNWVRQAPGKGL | |
| | | EWVARIRSKYNNYATYYADSVKDRFTISRDDSKNTAYLQMNNLKTEDTAVYYCVRHGNFGNSY | |
| | | ISYWAYWGQGTLVTVSSGGGGSGGGGSGGGGSQTVVTQEPSLTVSPGGTVTLTCGSSTGAVTS | |
| | | GNYPNWVQQKPGQAPRGLIGGTKFLAPGTPARFSGSLLGGKAALTLSGVQPEDEAEYYCVLWY | |
| | | SNRWVFGGGTKLTVLGGGGSQRFVTGHFGGLHPANGHHHHHH | |
| 335. | CH19_2-A10xI2C6-LY- | QRFVTGHFGGLYPANGGGGGSQVQLQESGPGLVKPSQTLSLTCTVSGGSISSGGYYWSWIRQH | |
| | FcB-LH | PGKGLEWIGYIYYSGSTFYNPSLRSRVTISVDTSKNQFSLKLSSVTAADTAVYYCARDSSSSR | |
| | | ALDYWGQGTLVTVSSGGGGSGGGGSGGGGSEIVLIQSPGILSLSPGERATLSCRASQSVSSSY | |
| | | LAWYQQKPGQAPRLLIYGASSRATGIPDRFSGSGSGTDFTLTISRLEPEDFAVYYCQQYDSSP | |
| | | RTFGQGTKLEIKSGGGGSEVQLVESGGGLVQPGGSLKLSCAASGFTFNKYAMNWVRQAPGKGL | |
| | | EWVARIRSKYNNYATYYADSVKDRFTISRDDSKNTAYLQMNNLKTEDTAVYYCVRHGNFGNSY | |
| | | ISYWAYWGQGTLVTVSSGGGGSGGGGSGGGGSQTVVTQEPSLTVSPGGTVTLTCGSSTGAVTS | |
| | | GNYPNWVQQKPGQAPRGLIGGTKFLAPGTPARFSGSLLGGKAALTLSGVQPEDEAEYYCVLWY | |
| | | SNRWVFGGGTKLTVLGGGGSQRFVTGHFGGLHPANGHHHHHH | |
| 336. | CH19_1-D11xI2C6-LY- | QRFVTGHFGGLYPANGGGGGSQVQLQESGPGLVKPSQTLSLTCTVSGGSISSGGYYWSWIRQH | |
| | FcB-LH | PGKGLEWIGYIYYRGRTYYNPSLKSRVTISVDTSKNQFSLKLSSVTAADTAVYYCARVYSNYG | |
| | | WFDPWGQGTLVTVSSGGGGSGGGGSGGGGSEIVLIQSPGILSLSPGERATLSCRASQSVSSSY | |
| | | LAWYQQKPGQAPRLLIYGASSRATGIPDRFSGSGSGIDFILTISRLEPEDFAVYYCQQYGSSP | |
| | | LTFGGGTKLEIKSGGGGSEVQLVESGGGLVQPGGSLKLSCAASGFTFNKYAMNWVRQAPGKGL | |
| | | EWVARIRSKYNNYATYYADSVKDRFTISRDDSKNTAYLQMNNLKTEDTAVYYCVRHGNFGNSY | |
| | | ISYWAYWGQGTLVTVSSGGGGSGGGGSGGGGSQTVVTQEPSLTVSPGGTVTLTCGSSTGAVTS | |
| | | GNYPNWVQQKPGQAPRGLIGGTKFLAPGTPARFSGSLLGGKAALTLSGVQPEDEAEYYCVLWY | |
| | | SNRWVFGGGTKLTVLGGGGSQRFVTGHFGGLHPANGHHHHHH | |
| 337. | CH19_9-F9xI2C6-LY-FcB- | QRFVTGHFGGLYPANGGGGGSQVQLQESGPGLVKPSETLSLTCTVSGGSISSGGYYWSWIRQH | |
| | LH | PGKGLEWIGYIFYRGRTYYNPSLKSRVTISVDTSKNQFSLKLSSVTAADTAVYYCARVYSNYG | |
| | | WFDPWGQGTLVTVSSGGGGSGGGGSGGGGSEIVLIQSPGILSLSPGERATLSCRASQSVSSSY | |
| | | LAWYQQKPGQAPRLLIYGASSRATGIPDRFSGSGSGIDFILTISRLEPEDFAVYYCQQYGSSP | |
| | | TFGGGTKVEIKSGGGGSEVQLVESGGGLVQPGGSLKLSCAASGFTFNKYAMNWVRQAPGKGLE | |
| | | WVARIRSKYNNYATYYADSVKDRFTISRDDSKNTAYLQMNNLKTEDTAVYYCVRHGNFGNSYI | |
| | | SYWAYWGQGTLVTVSSGGGGSGGGGSGGGGSQTVVTQEPSLTVSPGGTVTLTCGSSTGAVTSG | |
| | | NYPNWVQQKPGQAPRGLIGGTKFLAPGTPARFSGSLLGGKAALTLSGVQPEDEAEYYCVLWYS | |
| | | NRWVFGGGTKLTVLGGGGSQRFVTGHFGGLHPANGHHHHHH | |
| 338. | CH19_1-H8xI2C6-LY-FcB- | QRFVTGHFGGLYPANGGGGGSQVQLQESGPGLVKPSQTLSLTCTVSGGSISSGGYYWSWIRQH | |
| | LH | PGKGLEWIGYIFYRGRTYYNPSLKSRVTISVDTSKNQFSLKLSSVTAADTAVYYCARVYSNYG | |
| | | WFDPWGQGTLVTVSSGGGGSGGGGSGGGGSEIVLTQSPGTLSLSPGERATLSCRASQSVSSSY | |
| | | LAWYQQKPGQAPRLLIYGASSRATGIPDRFSGSGSGIDFILTISRLEPEDFAVYYCQQYGSSP | |
| | | LTFGGGTKVEIKSGGGGSEVQLVESGGGLVQPGGSLKLSCAASGFTFNKYAMNWVRQAPGKGL | |
| | | EWVARIRSKYNNYATYYADSVKDRFTISRDDSKNTAYLQMNNLKTEDTAVYYCVRHGNFGNSY | |
| | | ISYWAYWGQGTLVTVSSGGGGSGGGGSGGGGSQTVVIQEPSLIVSPGGIVTLICGSSTGAVIS | |
| | | GNYPNWVQQKPGQAPRGLIGGTKFLAPGTPARFSGSLLGGKAALTLSGVQPEDEAEYYCVLWY | |
| | | SNRWVFGGGTKLTVLGGGGSQRFVTGHFGGLHPANGHHHHHH | |
| 339. | CH19_1-B12xI2C6-LY- | QRFVIGHFGGLYPANGGGGGSQVQLQESGPGLVKPSQTLSLICTVSGGSISSGGYYWSWIRQH | |
| | FcB-LH | PGKGLEWIGYIYYRGRTYYNPSLKSRVTISVDTSKNQFSLKLSSVTAADTAVYYCARVYSNYG | |
| | | WFDPWGQGTLVTVSSGGGGSGGGGSGGGGSEIVLIQSPGILSLSPGERATLSCRASQSVSSSY | |
| | | LAWYQQKPGQAPRLLIYGASSRATGIPDRFSGSGSGTDFTLTISRLEPEDFAVYYCQQYGSSP | |
| | | TFGPGTKVEIKSGGGGSEVQLVESGGGLVQPGGSLKLSCAASGFTFNKYAMNWVRQAPGKGLE | |
| | | WVARIRSKYNNYATYYADSVKDRFTISRDDSKNTAYLQMNNLKTEDTAVYYCVRHGNFGNSYI | |
| | | SYWAYWGQGTLVTVSSGGGGSGGGGSGGGGSQTVVTQEPSLTVSPGGTVTLTCGSSTGAVTSG | |
| | | NYPNWVQQKPGQAPRGLIGGIKFLAPGTPARFSGSLLGGKAALTLSGVQPEDEAEYYCVLWYS | |
| | | NRWVFGGGTKLTVLGGGGSQRFVTGHFGGLHPANGHHHHHH | |
| 340. | CH19_0-C4xI2C6-LY-FcB- | QRFVTGHFGGLYPANGGGGGSQVQLQESGPGLVKPSQTLSLTCTVSGGSISSGGYYWSWIRQH | |
| | LH | PGKGLEWIGYIYYRGRTYYNPSLKSRVTISVDTSKNQFSLKLSSVTAADTAVYYCARVYSNYG | |
| | | WFDPWGQGTLVTVSSGGGGSGGGGSGGGGSEIVLIQSPGILSLSPGERATLSCRASQSVSSSY | |
| | | LAWYQQKPGQAPRLLIYGASSRATGIPDRFSGSGSGTDFTLTISRLEPEDFAVYYCQQYGSSP | |
| | | TFGGGTKVEIKSGGGGSEVQLVESGGGLVQPGGSLKLSCAASGFTFNKYAMNWVRQAPGKGLE | |
| | | WVARIRSKYNNYATYYADSVKDRFTISRDDSKNTAYLQMNNLKTEDTAVYYCVRHGNFGNSYI | |
| | | SYWAYWGQGTLVTVSSGGGGSGGGGSGGGGSQTVVTQEPSLTVSPGGTVTLTCGSSTGAVTSG | |
| | | NYPNWVQQKPGQAPRGLIGGIKFLAPGTPARFSGSLLGGKAALTLSGVQPEDEAEYYCVLWYS | |
| | | NRWVFGGGTKLTVLGGGGSQRFVTGHFGGLHPANGHHHHHH | |
| 341. | CH19_3-F2xI2C6-LY-FcB- | QRFVTGHFGGLYPANGGGGGSQVQLQESGPGLVKPSQTLSLTCTISGGSISSGGYYWSWIRQH | |
| | LH | PGKGLEWIGYIFYSGRTYYNPSLKSRVTISVDTSKNQFSLKLTSVTAADTAVYYCARVNSNYG | |
| | | WFDPWGQGTLVTVSSGGGGSGGGGSGGGGSEIVLIQSPGILSLSPGERATLSCRASQSVSSSY | |
| | | LAWYQQKPGQAPRLLIYGASSRATGIPDRFSGSGSGTDFTLTISRLEPEDFAVYYCQQYGSSP | |
| | | TFGGGTKVEIKSGGGGSEVQLVESGGGLVQPGGSLKLSCAASGFTFNKYAMNWVRQAPGKGLE | |
| | | WVARIRSKYNNYATYYADSVKDRFTISRDDSKNTAYLQMNNLKTEDTAVYYCVRHGNFGNSYI | |
| | | SYWAYWGQGTLVTVSSGGGGSGGGGSGGGGSQTVVTQEPSLTVSPGGTVTLTCGSSTGAVTSG | |
| | | NYPNWVQQKPGQAPRGLIGGTKFLAPGTPARFSGSLLGGKAALTLSGVQPEDEAEYYCVLWYS | |
| | | NRWVFGGGTKLTVLGGGGSQRFVTGHFGGLHPANGHHHHHH | |
| 342. | CH19_3-B10xI2C6-LY- | QRFVTGHFGGLYPANGGGGGSQVQLQESGPGLVKPSQTLSLTCTVSGGSISSGGYYWSWIRQH | |
| | FcB-LH | PGKGLDWIGYIFYRGRTYYNPSLKSRVTISVDTSKNQFSLKLSSVTAADTAVYYCARVNSNYG | |
| | | WFDPWGQGTLVTVSSGGGGSGGGGSGGGGSEIVLIQSPGILSLSPGERATLSCRASQSVSSSY | |
| | | LAWYQQKPGQAPRLLIYGASSRATGIPDRFSGSGSGIDFTLTISRLEPEDFAVYYCQQYGSSP | |
| | | LTFGGGTKVEIKSGGGGSEVQLVESGGGLVQPGGSLKLSCAASGFTFNKYAMNWVRQAPGKGL | |
| | | EWVARIRSKYNNYATYYADSVKDRFTISRDDSKNTAYLQMNNLKTEDTAVYYCVRHGNFGNSY | |
| | | ISYWAYWGQGTLVTVSSGGGGSGGGGSGGGGSQTVVTQEPSLTVSPGGTVTLTCGSSTGAVTS | |
| | | GNYPNWVQQKPGQAPRGLIGGTKFLAPGTPARFSGSLLGGKAALTLSGVQPEDEAEYYCVLWY | |
| | | SNRWVFGGGTKLTVLGGGGSQRFVTGHFGGLHPANGHHHHHH | |
| 343. | CH19_0-G4xI2C6-LY-FcB- | QRFVTGHFGGLYPANGGGGGSQVQLQESGPGLVKPSQTLSLTCTVSGGSISSGGYYWSWIRQH | |
| | LH | PGKGLEWIGYIYYRGRTYYNPSLKSRVTISVDTSKNQFSLKLSSVTAADTAVYYCARVYSNYG | |
| | | WFDPWGQGTLVTVSSGGGGSGGGGSGGGGSEIVLIQSPGILSLSPGERATLSCRASQSVSSSY | |
| | | LAWYQQKPGQAPRLLIYGASTRATGIPDRFSGSGSGTDFTLTISRLEPEDFAVYYCQQYGSSP | |
| | | SFGQGTKVEIKSGGGGSEVQLVESGGGLVQPGGSLKLSCAASGFTFNKYAMNWVRQAPGKGLE | |
| | | WVARIRSKYNNYATYYADSVKDRFTISRDDSKNTAYLQMNNLKTEDTAVYYCVRHGNFGNSYI | |
| | | SYWAYWGQGTLVTVSSGGGGSGGGGSGGGGSQTVVTQEPSLTVSPGGTVTLTCGSSTGAVTSG | |
| | | NYPNWVQQKPGQAPRGLIGGTKFLAPGTPARFSGSLLGGKAALTLSGVQPEDEAEYYCVLWYS | |
| | | NRWVFGGGTKLTVLGGGGSQRFVTGHFGGLHPANGHHHHHH | |
| 344. | CH19_0-H5xI2C6-LY-FcB- | QRFVTGHFGGLYPANGGGGGSQVQLQESGPGLVRPSQTLSLTCTVSGGSISSGGYYWSWIRQH | |
| | LH | PGKGLEWIGYIYYRGRTYYNPSLKSRVTISVDTSKNQFSLKLSSVTAADTAVYYCARVYSNYG | |
| | | WFDPWGQGTLVTVSSGGGGSGGGGSGGGGSEIVLTQSPGTLSLSPGERATLSCRASQSVSSSY | |
| | | LAWYQQKPGQAPRLLIYGASSRATGIPDRFSGSGSGTDFTLTISRLEPEDFAVYYCQQYDTSP | |
| | | LTFGGGTKVEIKSGGGGSEVQLVESGGGLVQPGGSLKLSCAASGFTFNKYAMNWVRQAPGKGL | |
| | | EWVARIRSKYNNYATYYADSVKDRFTISRDDSKNTAYLQMNNLKTEDTAVYYCVRHGNFGNSY | |
| | | ISYWAYWGQGTLVTVSSGGGGSGGGGSGGGGSQTVVIQEPSLIVSPGGIVTLICGSSTGAVTS | |
| | | GNYPNWVQQKPGQAPRGLIGGTKFLAPGTPARFSGSLLGGKAALTLSGVQPEDEAEYYCVLWY | |
| | | SNRWVFGGGTKLTVLGGGGSQRFVTGHFGGLHPANGHHHHHH | |
| 345. | CH19_0-B8xI2C6-LY-FcB- | QRFVTGHFGGLYPANGGGGGSQVQLQESGPGLVKPSQTLSLTCTVSGGSISSGGYYWSWIRQH | |
| | LH | PGKGLEWIGYIYYRGRTYYNPSLKSRVTISVDTSKNQFSLKLSSVTAADTAVYYCARVYSNYG | |
| | | WFDPWGQGTLVTVSSGGGGSGGGGSGGGGSEIVLTQSPGTLSLSPGERATLSCRASQSVSSSY | |
| | | LAWYQQKPGQAPRLLIYGASSRATGIPDRFSGSGSGTDFTLTISRLEPEDFAVYYCQQYGSSP | |
| | | TFGGGTKVEIKSGGGGSEVQLVESGGGLVQPGGSLKLSCAASGFTFNKYAMNWVRQAPGKGLE | |
| | | WVARIRSKYNNYATYYADSVKDRFTISRDDSKNTAYLQMNNLKTEDTAVYYCVRHGNFGNSYI | |
| | | SYWAYWGQGTLVTVSSGGGGSGGGGSGGGGSQTVVTQEPSLTVSPGGTVTLTCGSSTGAVTSG | |
| | | NYPNWVQQKPGQAPRGLIGGTKFLAPGTPARFSGSLLGGKAALTLSGVQPEDEAEYYCVLWYS | |
| | | NRWVFGGGTKLTVLGGGGSQRFVTGHFGGLHPANGHHHHHH | |
| 346. | CH19_2-D9xI2C6-LY-FcB- | QRFVTGHFGGLYPANGGGGGSQVQLQESGPGLVKPSQTLSLTCTVSGGSISSGGYYWSWIRQH | |
| | LH | PGKGLEWIGYIYYRGRTYYNPSLKSRVTISVDTSKNQFSLKLSSVTAADTAVYYCARVYSNYG | |
| | | WFDPWGQGTLVTVSSGGGGSGGGGSGGGGSEIVLTQSPGTLSLSPGERATLSCRASQSVSSSY | |
| | | LAWYQQKPGQAPRLLIYGASSRATGIPDRFSGSGSGTDFTLTISRLEPEDFAVYYCQQYGSSP | |
| | | LTFGGGTKVEIKSGGGGSEVQLVESGGGLVQPGGSLKLSCAASGFTFNKYAMNWVRQAPGKGL | |
| | | EWVARIRSKYNNYATYYADSVKDRFTISRDDSKNTAYLQMNNLKTEDTAVYYCVRHGNFGNSY | |
| | | ISYWAYWGQGTLVTVSSGGGGSGGGGSGGGGSQTVVTQEPSLTVSPGGTVTLTCGSSTGAVTS | |
| | | GNYPNWVQQKPGQAPRGLIGGTKFLAPGTPARFSGSLLGGKAALTLSGVQPEDEAEYYCVLWY | |
| | | SNRWVFGGGTKLTVLGGGGSQRFVTGHFGGLHPANGHHHHHH | |
| 347. | CH19_8-H7xI2C6-LY-FcB- | QRFVTGHFGGLYPANGGGGGSQVQLQESGPGLVKPSQTLSLTCTVSGGSISSGGYYWSWVRQH | |
| | LH | PGKGLEWIGYIFYSGRTYYNPSLKSRVIISVDTSKNQFSLKLSSVTAADTAVYYCARVYSNYG | |
| | | WFDPWGQGTLVTVSSGGGGSGGGGSGGGGSEIVLIQSPGILSLSPGERATLSCRASQSVSSSY | |
| | | LAWYQQKPGQAPRLLIYGASSRATGIPDRFSGSGSGIDFILTISRLEPEDFAVYYCQQYGSSP | |
| | | LTFGGGTKVEIKSGGGGSEVQLVESGGGLVQPGGSLKLSCAASGFTFNKYAMNWVRQAPGKGL | |
| | | EWVARIRSKYNNYATYYADSVKDRFTISRDDSKNTAYLQMNNLKTEDTAVYYCVRHGNFGNSY | |
| | | ISYWAYWGQGTLVTVSSGGGGSGGGGSGGGGSQTVVTQEPSLTVSPGGTVTLTCGSSTGAVTS | |
| | | GNYPNWVQQKPGQAPRGLIGGTKFLAPGTPARFSGSLLGGKAALTLSGVQPEDEAEYYCVLWY | |
| | | SNRWVFGGGTKLTVLGGGGSQRFVTGHFGGLHPANGHHHHHH | |
| 348. | CH19_9-C2xI2C6-LY-FcB- | QRFVTGHFGGLYPANGGGGGSQVQLQESGPGLVKPSQTLSLTCTVSGGSISSGGYYWSWIRQH | |
| | LH | PGKGLEWIGYIFYSGRTYYNPSLKSRVTISVDTSKNQFSLKLSSVTAADTAVYYCARVYSNYG | |
| | | WFDPWGQGTLVTVSSGGGGSGGGGSGGGGSEIVLIQSPGILSLSPGERATLSCRASQSVSSSY | |
| | | LAWYQQKPGQAPRLLIYGASSRATGIPDRFSGSGSGIDFILTISRLEPEDFAVYYCQQYGSSP | |
| | | LTFGGGTKVEIKSGGGGSEVQLVESGGGLVQPGGSLKLSCAASGFTFNKYAMNWVRQAPGKGL | |
| | | EWVARIRSKYNNYATYYADSVKDRFTISRDDSKNTAYLQMNNLKTEDTAVYYCVRHGNFGNSY | |
| | | ISYWAYWGQGTLVTVSSGGGGSGGGGSGGGGSQTVVTQEPSLTVSPGGTVTLTCGSSTGAVTS | |
| | | GNYPNWVQQKPGQAPRGLIGGTKFLAPGTPARFSGSLLGGKAALTLSGVQPEDEAEYYCVLWY | |
| | | SNRWVFGGGTKLTVLGGGGSQRFVTGHFGGLHPANGHHHHHH | |
| 349. | CH19_3-D5xI2C6-LY-FcB- | QRFVTGHFGGLYPANGGGGGSQVQLQESGPGLVKPSQTLSLTCTVSGGSISSGGYYWSWIRQH | |
| | LH | PGKGLEWIGYIFYSGRTYYNPSLKSRVSISVDTSKNQFSLKLSSVTAADTAVYYCARVYSNYG | |
| | | WFDPWGQGTLVTVSSGGGGSGGGGSGGGGSEIVLTQSPGTLSLSPGERATLSCRASQSVSSSY | |
| | | LAWYQQKPGQAPRLLIYGASSRATGIPDRFSGSGSGIDFILTISRLEPEDFAVYYCQQYGSSP | |
| | | LTFGGGTKVEIKSGGGGSEVQLVESGGGLVQPGGSLKLSCAASGFTFNKYAMNWVRQAPGKGL | |
| | | EWVARIRSKYNNYATYYADSVKDRFTISRDDSKNTAYLQMNNLKTEDTAVYYCVRHGNFGNSY | |
| | | ISYWAYWGQGTLVTVSSGGGGSGGGGSGGGGSQTVVIQEPSLIVSPGGIVTLICGSSTGAVIS | |
| | | GNYPNWVQQKPGQAPRGLIGGTKFLAPGTPARFSGSLLGGKAALTLSGVQPEDEAEYYCVLWY | |
| | | SNRWVFGGGTKLTVLGGGGSQRFVTGHFGGLHPANGHHHHHH | |
| 350. | CH19_1-G11xI2C6-LY- | QRFVIGHFGGLYPANGGGGGSQVQLQESGPGLVKPSETLSLICTVSGGSVSSGGYYWSWIRQP | |
| | FcB-LH | PGKGLEWIGYIYYRGRTYYNPSLKSRVTISVDTSKNQFSLKLSSVTAADTAVYYCARVYSNYG | |
| | | WFDPWGQGTLVTVSSGGGGSGGGGSGGGGSEIVLIQSPGILSLSPGERATLSCRASQSVSSSY | |
| | | LAWYQQKPGQAPRLLIYGASSRATGIPDRFSGSGSGTDFTLTISRLEPEDFAVYYCQQYGSSP | |
| | | LTFGGGTKVEIKSGGGGSEVQLVESGGGLVQPGGSLKLSCAASGFTFNKYAMNWVRQAPGKGL | |
| | | EWVARIRSKYNNYATYYADSVKDRFTISRDDSKNTAYLQMNNLKTEDTAVYYCVRHGNFGNSY | |
| | | ISYWAYWGQGTLVTVSSGGGGSGGGGSGGGGSQTVVTQEPSLTVSPGGTVTLTCGSSTGAVTS | |
| | | GNYPNWVQQKPGQAPRGLIGGTKFLAPGTPARFSGSLLGGKAALTLSGVQPEDEAEYYCVLWY | |
| | | SNRWVFGGGTKLTVLGGGGSQRFVTGHFGGLHPANGHHHHHH | |
| 351. | CH19_1-H11xI2C6-LY- | QRFVTGHFGGLYPANGGGGGSQVQLQESGPGLVKPSQTLSLTCTVSGGSISSGGYYWSWIRQH | |
| | FcB-LH | PGKGLEWIGYIYYRGRTYYNPSLKSRVTISVDTSKNQFSLKLSSVTAADTAVYYCARVYSNYG | |
| | | WFDPWGQGTLVTVSSGGGGSGGGGSGGGGSEIVLIQSPGILSLSPGERATLSCRASQSVSSSY | |
| | | LAWYQQKPGQAPRLLIYGASSRATGIPDRFSGSGSGTDFTLTISRLEPEDFAVYYCQQYGSSP | |
| | | TFGQGTRLEIKSGGGGSEVQLVESGGGLVQPGGSLKLSCAASGFTFNKYAMNWVRQAPGKGLE | |
| | | WVARIRSKYNNYATYYADSVKDRFTISRDDSKNTAYLQMNNLKTEDTAVYYCVRHGNFGNSYI | |
| | | SYWAYWGQGTLVTVSSGGGGSGGGGSGGGGSQTVVTQEPSLTVSPGGTVTLTCGSSTGAVTSG | |
| | | NYPNWVQQKPGQAPRGLIGGIKFLAPGTPARFSGSLLGGKAALTLSGVQPEDEAEYYCVLWYS | |
| | | NRWVFGGGTKLTVLGGGGSQRFVTGHFGGLHPANGHHHHHH | |
| 352. | CH19_9-F3xI2C6-LY-FcB- | QRFVTGHFGGLYPANGGGGGSQVQLQESGPGLVKPSQTLSLTCTVSGGSISSGGYYWSWIRQH | |
| | LH | PGKGLEWIGYIFYSGKTYYNPSLKSRVSISVDTSKNQFSLKLSSVTAADTAVYYCARVYSNYG | |
| | | WFDPWGQGTLVTVSSGGGGSGGGGSGGGGSEIVLIQSPGILSLSPGERATLSCRASQSVSSSY | |
| | | LAWYQQKPGQAPRLLIYGASSRATGIPDRFSGSGSGTDFTLTISRLEPEDFAVYYCQQYGSSP | |
| | | ITFGQGTRLEIKSGGGGSEVQLVESGGGLVQPGGSLKLSCAASGFTFNKYAMNWVRQAPGKGL | |
| | | EWVARIRSKYNNYATYYADSVKDRFTISRDDSKNTAYLQMNNLKTEDTAVYYCVRHGNFGNSY | |
| | | ISYWAYWGQGTLVTVSSGGGGSGGGGSGGGGSQTVVTQEPSLTVSPGGTVTLTCGSSTGAVTS | |
| | | GNYPNWVQQKPGQAPRGLIGGTKFLAPGTPARFSGSLLGGKAALTLSGVQPEDEAEYYCVLWY | |
| | | SNRWVFGGGTKLTVLGGGGSQRFVTGHFGGLHPANGHHHHHH | |
| 353. | CH19_2-G6xI2C6-LY-FcB- | QRFVTGHFGGLYPANGGGGGSQVQLQESGPGLVKPSETLSLTCTVSGGSISSYYWSWIRQPPG | |
| | LH | KGLEWIGYIYYSGSTNYNPSLKSRVTMSIDTSKNQFSLKLISVTAADTAVYYCARDQRRIVAA | |
| | | GGYYYGMDVWGQGTIVIVSSGGGGSGGGGSGGGGSEIVLIQSPGILSLSPGERATLSCRASQS | |
| | | VSSSYLAWYQQKPGQAPRLLIYGASTRATGIPARFSGSGSGTDFILTISRLEPEDFAVYYCQQ | |
| | | YGSSPFTFGPGTKVDIKSGGGGSEVQLVESGGGLVQPGGSLKLSCAASGFTFNKYAMNWVRQA | |
| | | PGKGLEWVARIRSKYNNYATYYADSVKDRFTISRDDSKNTAYLQMNNLKTEDTAVYYCVRHGN | |
| | | FGNSYISYWAYWGQGTLVTVSSGGGGSGGGGSGGGGSQTVVTQEPSLTVSPGGTVTLTCGSST | |
| | | GAVTSGNYPNWVQQKPGQAPRGLIGGTKFLAPGTPARFSGSLLGGKAALTLSGVQPEDEAEYY | |
| | | CVLWYSNRWVFGGGTKLTVLGGGGSQRFVTGHFGGLHPANGHHHHHH | |
| 354. | CH19_2-H7xI2C6-LY-FcB- | QRFVTGHFGGLYPANGGGGGSQVQLQESGPGLVKPSQTLSLTCTVSGGSISSNDYYWSWIRQH | |
| | LH | PGKGLEWIGYIYYSGSTFYNPSLKSRGAISVDTSKNQFSLKLTSVTAADTAVYYCARGVYRTG | |
| | | AFDIWGQGTMVTVSSGGGGSGGGGSGGGGSDIQMTQSPSSLSASVGDRVTITCRASQSISSYL | |
| | | NWYQQKPGKAPKSLIYAASSLQSGVPSKFSGSGSGTDFILTISSLQPEDIATYYCQQSYSTPQ | |
| | | AFGGGTKVDIKSGGGGSEVQLVESGGGLVQPGGSLKLSCAASGFTFNKYAMNWVRQAPGKGLE | |
| | | WVARIRSKYNNYATYYADSVKDRFTISRDDSKNTAYLQMNNLKTEDTAVYYCVRHGNFGNSYI | |
| | | SYWAYWGQGTLVIVSSGGGGSGGGGSGGGGSQTVVTQEPSLIVSPGGIVTLICGSSTGAVISG | |
| | | NYPNWVQQKPGQAPRGLIGGTKFLAPGTPARFSGSLLGGKAALTLSGVQPEDEAEYYCVLWYS | |
| | | NRWVFGGGTKLTVLGGGGSQRFVTGHFGGLHPANGHHHHHH | |
| 355. | CH19_5-B3xI2C6-LY-FcB- | QRFVTGHFGGLYPANGGGGGSQVQLVQSGAEVKKPGASVKVSCKASGYTFTYYGISWVRQAPG | |
| | LH | QGLEWMGWINPYGGETNYAQKLQGRVIMITDTSTSTAYMELRSLRSDDTAVYYCARGSGGFDY | |
| | | WGQGTLVTVSSGGGGSGGGGSGGGGSDIVMTQTPLSLSVTPGEPASISCRSSQSLLHSNGYNY | |
| | | LDWYLQKPGQSPQLLIYLGSYRASGVPDRFSGSGSGTDFTLKISRVEAEDVGVYYCMQALQTP | |
| | | FTFGPGTKVDIKSGGGGSEVQLVESGGGLVQPGGSLKLSCAASGFTFNKYAMNWVRQAPGKGL | |
| | | EWVARIRSKYNNYATYYADSVKDRFTISRDDSKNTAYLQMNNLKTEDTAVYYCVRHGNFGNSY | |
| | | ISYWAYWGQGTLVTVSSGGGGSGGGGSGGGGSQTVVIQEPSLIVSPGGIVTLICGSSTGAVIS | |
| | | GNYPNWVQQKPGQAPRGLIGGTKFLAPGTPARFSGSLLGGKAALTLSGVQPEDEAEYYCVLWY | |
| | | SNRWVFGGGTKLTVLGGGGSQRFVTGHFGGLHPANGHHHHHH | |
| 356. | CH19_5-E10xI2C6-LY- | QRFVTGHFGGLYPANGGGGGSQVQLVQSGAEVKKPGASVKVSCKASGYTFTYYGISWVRQAPG | |
| | FcB-LH | QGLEWMGWINPYSGATNYAQKLQGRVTMTTDTSTSTAYMELRSLRSDDTAVYYCARGSGGFDY | |
| | | WGQGTLVTVSSGGGGSGGGGSGGGGSDIVMTQTPLSLSVTPGEPASISCRSSQSLLHSNGYNY | |
| | | LDWYLQKPGQSPQLLIYLGSYRASGVPDRFSGSGSGIDFTLKISRVEAEDVGVYYCMQALQTP | |
| | | FTFGPGTKVDIKSGGGGSEVQLVESGGGLVQPGGSLKLSCAASGFTFNKYAMNWVRQAPGKGL | |
| | | EWVARIRSKYNNYATYYADSVKDRFTISRDDSKNTAYLQMNNLKTEDTAVYYCVRHGNFGNSY | |
| | | ISYWAYWGQGTLVTVSSGGGGSGGGGSGGGGSQTVVTQEPSLTVSPGGTVTLTCGSSTGAVTS | |
| | | GNYPNWVQQKPGQAPRGLIGGTKFLAPGTPARFSGSLLGGKAALTLSGVQPEDEAEYYCVLWY | |
| | | SNRWVFGGGTKLTVLGGGGSQRFVTGHFGGLHPANGHHHHHH | |
| 357. | CH19_6-G10xI2C6-LY- | QRFVTGHFGGLYPANGGGGGSQVQLVQSGAEVKKPGASVKVSCKASGYTFTYYGISWVRQAPG | |
| | FcB-LH | QGLEWMGWINPYTGKTNYAQKLQGRVTMTTDTSTSTAYMELRSLRSDDTAVYYCARGSGGFDY | |
| | | WGQGTLVTVSSGGGGSGGGGSGGGGSDIVMTQTPLSLSVTPGEPASISCRSSQSLLHSNGYNY | |
| | | LDWYLQKPGQSPQLLIYLGSYRASGVPDRFSGSGSGTDFTLKISRVEAEDVGVYYCMQALQTP | |
| | | FTFGPGTKVDIKSGGGGSEVQLVESGGGLVQPGGSLKLSCAASGFTFNKYAMNWVRQAPGKGL | |
| | | EWVARIRSKYNNYATYYADSVKDRFTISRDDSKNTAYLQMNNLKTEDTAVYYCVRHGNFGNSY | |
| | | ISYWAYWGQGTLVTVSSGGGGSGGGGSGGGGSQTVVTQEPSLTVSPGGTVTLTCGSSTGAVTS | |
| | | GNYPNWVQQKPGQAPRGLIGGTKFLAPGTPARFSGSLLGGKAALTLSGVQPEDEAEYYCVLWY | |
| | | SNRWVFGGGTKLTVLGGGGSQRFVTGHFGGLHPANGHHHHHH | |
| 358. | CH19_4-H8xI2C6-LY-FcB- | QRFVIGHFGGLYPANGGGGGSQVQLVQSGAEVKKPGASVKVSCKASGYTFTYYGISWVRQAPG | |
| | LH | QGLEWMGWINPYTGKTNYAQKLQGRVTMTTDTSTSTAYMELRSLRSDDTAVYYCARGSGGFDY | |
| | | WGQGTLVTVSSGGGGSGGGGSGGGGSDIVMTQTPLSLSVTPGEPASISCRSSQSLLHSVGYNY | |
| | | LDWYLQKPGQSPQLLIYLGSYRASGVPDRFSGSGSGIDFTLKISRVEAEDVGVYYCMQALQIP | |
| | | FTFGPGTKVDIKSGGGGSEVQLVESGGGLVQPGGSLKLSCAASGFTFNKYAMNWVRQAPGKGL | |
| | | EWVARIRSKYNNYATYYADSVKDRFTISRDDSKNTAYLQMNNLKTEDTAVYYCVRHGNFGNSY | |
| | | ISYWAYWGQGTLVTVSSGGGGSGGGGSGGGGSQTVVTQEPSLTVSPGGTVTLTCGSSTGAVTS | |
| | | GNYPNWVQQKPGQAPRGLIGGTKFLAPGTPARFSGSLLGGKAALTLSGVQPEDEAEYYCVLWY | |
| | | SNRWVFGGGTKLTVLGGGGSQRFVTGHFGGLHPANGHHHHHH | |
| 359. | CH19_2-E4xI2C6-LY-FcB- | QRFVTGHFGGLYPANGGGGGSQVQLVQSGAEVKKPGASVKVSCKASGYTFTSYGISWVRQAPG | |
| | LH | QGLEWMGWINPYIGNRNYAQKVQDRVIMITDTSTNTAYMELSSLRSDDTAVYYCARGSGGFDY | |
| | | WGQGTLVTVSSGGGGSGGGGSGGGGSDIVMTQSPLSLPVTLGQPASISCRSSQSLLHSVGYNY | |
| | | LDWYLQKPGQSPQLLIYLGSNRASGVPDRFSGSGSGIDFTLKISRVEAEDVGVYYCMQALQIP | |
| | | FTFGPGTKLEIKSGGGGSEVQLVESGGGLVQPGGSLKLSCAASGFTFNKYAMNWVRQAPGKGL | |
| | | EWVARIRSKYNNYATYYADSVKDRFTISRDDSKNTAYLQMNNLKTEDTAVYYCVRHGNFGNSY | |
| | | ISYWAYWGQGTLVTVSSGGGGSGGGGSGGGGSQTVVTQEPSLTVSPGGTVTLTCGSSTGAVTS | |
| | | GNYPNWVQQKPGQAPRGLIGGTKFLAPGTPARFSGSLLGGKAALTLSGVQPEDEAEYYCVLWY | |
| | | SNRWVFGGGTKLTVLGGGGSQRFVTGHFGGLHPANGHHHHHH | |
| 360. | CH19_6-B8xI2C6-LY-FcB- | QRFVIGHFGGLYPANGGGGGSQVQLVQSGAEVKKPGASVKVSCKASGYTFTYYGISWVRQAPG | |
| | LH | QGLEWMGWINPYTGKTNYAQKLQDRVTMTTDTSTNTAYMELRSLRSDDTAVYYCARGSGGFDY | |
| | | WGQGTLVTVSSGGGGSGGGGSGGGGSDIVMTQTPLSLPVTPGEPASISCRSSQSLLHSVGYNY | |
| | | LDWYLQKPGQSPQLLIYLGSNRASGVPDRFSGSGSGIDFTLKISRVEAEDVGVYYCMQALQIP | |
| | | FTFGPGTKVDIKSGGGGSEVQLVESGGGLVQPGGSLKLSCAASGFTFNKYAMNWVRQAPGKGL | |
| | | EWVARIRSKYNNYATYYADSVKDRFTISRDDSKNTAYLQMNNLKTEDTAVYYCVRHGNFGNSY | |
| | | ISYWAYWGQGTLVTVSSGGGGSGGGGSGGGGSQTVVIQEPSLIVSPGGIVTLICGSSIGAVIS | |
| | | GNYPNWVQQKPGQAPRGLIGGTKFLAPGTPARFSGSLLGGKAALTLSGVQPEDEAEYYCVLWY | |
| | | SNRWVFGGGTKLTVLGGGGSQRFVTGHFGGLHPANGHHHHHH | |
| 361. | CH19_0-B4xI2C6-LY-FcB- | QRFVTGHFGGLYPANGGGGGSQVQLVQSGAEVKKPGASVKVSCKASGYTFTTYGISWVRQAPG | |
| | LH | QGLEWMGWINPYTGKTNYAQKLQGRVTMATDTSTSTAYMELRSLRSDDTAVYYCARGSGGFDY | |
| | | WGQGTLVTVSSGGGGSGGGGSGGGGSDIVMTQSPLSLPVTPGEPASISCRSSQSLLHSVGYNY | |
| | | LDWYLQKPGQSPQLLIYLGSNRASGVPDRFSGSGSGTDFTLKISRVEAEDVGVYYCMQALQTP | |
| | | FTFGPGTKLEIKSGGGGSEVQLVESGGGLVQPGGSLKLSCAASGFTFNKYAMNWVRQAPGKGL | |
| | | EWVARIRSKYNNYATYYADSVKDRFTISRDDSKNTAYLQMNNLKTEDTAVYYCVRHGNFGNSY | |
| | | ISYWAYWGQGTLVTVSSGGGGSGGGGSGGGGSQTVVTQEPSLTVSPGGTVTLTCGSSTGAVTS | |
| | | GNYPNWVQQKPGQAPRGLIGGTKFLAPGTPARFSGSLLGGKAALTLSGVQPEDEAEYYCVLWY | |
| | | SNRWVFGGGTKLTVLGGGGSQRFVTGHFGGLHPANGHHHHHH | |
| 362. | CH19_9-F1xI2C6-LY-FcB- | QRFVTGHFGGLYPANGGGGGSQVQLVQSGAEVKEPGASVKVSCKASGYTFTYYGISWVRQAPG | |
| | LH | QGLEWMGWINPYTGNRNYAQKVQDRVTMTTDTSTNTAYMELRSLRSDDTAVYYCARGSGGFDY | |
| | | WGQGTLVTVSSGGGGSGGGGSGGGGSDIVMTQSPLSLPVTPGEPASISCRSSQSLLHSVGYNY | |
| | | LDWYLQKPGQSPQLLIYLGSNRASGVPDRFSGSGSGTDFTLKISRVEAEDVGVYYCMQALQTP | |
| | | FTFGPGTKLEIKSGGGGSEVQLVESGGGLVQPGGSLKLSCAASGFTFNKYAMNWVRQAPGKGL | |
| | | EWVARIRSKYNNYATYYADSVKDRFTISRDDSKNTAYLQMNNLKTEDTAVYYCVRHGNFGNSY | |
| | | ISYWAYWGQGTLVTVSSGGGGSGGGGSGGGGSQTVVTQEPSLTVSPGGTVTLTCGSSTGAVTS | |
| | | GNYPNWVQQKPGQAPRGLIGGTKFLAPGTPARFSGSLLGGKAALTLSGVQPEDEAEYYCVLWY | |
| | | SNRWVFGGGTKLTVLGGGGSQRFVTGHFGGLHPANGHHHHHH | |
| 363. | CH19_4-A7xI2C6-LY-FcB- | QRFVTGHFGGLYPANGGGGGSQVQLVQSGAEVKKPGASVKVSCKASGYTFTYYGISWVRQAPG | |
| | LH | QGLEWMGWINPYTGKTNYAQKLQGRVTMTTDTSTSTAYMELRSLRSDDTAVYYCARGSGGFDY | |
| | | WGQGTLVTVSSGGGGSGGGGSGGGGSDIVMTQSPLSLPVTPGEPASISCRSSQSLLHSVGYNY | |
| | | LDWYLQKPGQSPQLLIYLGSNRASGVPDRFSGSGSGTDFTLKISRVEAEDVGVYYCMQALQTP | |
| | | FTFGPGTKVEIKSGGGGSEVQLVESGGGLVQPGGSLKLSCAASGFTFNKYAMNWVRQAPGKGL | |
| | | EWVARIRSKYNNYATYYADSVKDRFTISRDDSKNTAYLQMNNLKTEDTAVYYCVRHGNFGNSY | |
| | | ISYWAYWGQGTLVTVSSGGGGSGGGGSGGGGSQTVVTQEPSLTVSPGGTVTLTCGSSTGAVTS | |
| | | GNYPNWVQQKPGQAPRGLIGGTKFLAPGTPARFSGSLLGGKAALTLSGVQPEDEAEYYCVLWY | |
| | | SNRWVFGGGTKLTVLGGGGSQRFVTGHFGGLHPANGHHHHHH | |
| 364. | CH19_6-E12xI2C6-LY- | QRFVTGHFGGLYPANGGGGGSQVQLVQSGAEVKKPGASVKVSCKASGYTFTSYGITWVRQAPG | |
| | FcB-LH | QGLEWMGWINPYTGNRNYAQKVQGRVTMTTDTSTSTAYMELRSLRSDDTAVYYCARGSGGFDY | |
| | | WGQGTLVTVSSGGGGSGGGGSGGGGSDIVMTQSPLSLSVTPGEPASISCRSSQSLLHSVGYNY | |
| | | LDWYLQKPGQSPQLLIYLGSNRASGVPDRFSGSGSGIDFTLKISRVEAEDVGVYYCMQALQTP | |
| | | FTFGPGTKVDIKSGGGGSEVQLVESGGGLVQPGGSLKLSCAASGFTFNKYAMNWVRQAPGKGL | |
| | | EWVARIRSKYNNYATYYADSVKDRFTISRDDSKNTAYLQMNNLKTEDTAVYYCVRHGNFGNSY | |
| | | ISYWAYWGQGTLVTVSSGGGGSGGGGSGGGGSQTVVTQEPSLTVSPGGTVTLTCGSSTGAVTS | |
| | | GNYPNWVQQKPGQAPRGLIGGTKFLAPGTPARFSGSLLGGKAALTLSGVQPEDEAEYYCVLWY | |
| | | SNRWVFGGGTKLTVLGGGGSQRFVTGHFGGLHPANGHHHHHH | |
| 365. | CH19_6-C12xI2C6-LY- | QRFVTGHFGGLYPANGGGGGSQVQLVQSGAEVKKPGASVKVSCKASGYTFTSYGISWVRQAPG | |
| | FcB-LH | QGLEWMGWINPYIGNRNYAQKFQGRVIMITDTSTNTAYMELSSLRSEDTAVYYCARGSGGFDY | |
| | | WGQGTLVTVSSGGGGSGGGGSGGGGSDIVMTQSPLSLPVTPGEPASISCRSSQSLLHSVGYNY | |
| | | LDWYLQKPGQSPQLLIYLGSNRASGVPDRFSGSGSGIDFTLKISRVEAEDVGVYYCMQALQTP | |
| | | FTFGPGTKVDIKSGGGGSEVQLVESGGGLVQPGGSLKLSCAASGFTFNKYAMNWVRQAPGKGL | |
| | | EWVARIRSKYNNYATYYADSVKDRFTISRDDSKNTAYLQMNNLKTEDTAVYYCVRHGNFGNSY | |
| | | ISYWAYWGQGTLVTVSSGGGGSGGGGSGGGGSQTVVIQEPSLIVSPGGIVTLICGSSIGAVIS | |
| | | GNYPNWVQQKPGQAPRGLIGGTKFLAPGTPARFSGSLLGGKAALTLSGVQPEDEAEYYCVLWY | |
| | | SNRWVFGGGTKLTVLGGGGSQRFVTGHFGGLHPANGHHHHHH | |
| 366. | CH19_6-A7xI2C6-LY-FcB- | QRFVTGHFGGLYPANGGGGGSQVQLVQSGAEVKKPGASVKVSCKASGYSFTSYGISWVRQAPG | |
| | LH | QGLEWMGWINPYIGNRNYAQKVQGRVIMITDTSTSTAYMELRSLRSDDTAVYYCARGSGGFDY | |
| | | WGQGILVTVSSGGGGSGGGGSGGGGSDIVMTQSPLSLPVTPGEPASISCRSSQSLLHSVGYNY | |
| | | LDWYLQKPGQSPQLLIYLGSNRASGVPDRFSGSGSGTDFTLKISRVEAEDVGVYYCMQALQTP | |
| | | FTFGPGTKVEIKSGGGGSEVQLVESGGGLVQPGGSLKLSCAASGFTFNKYAMNWVRQAPGKGL | |
| | | EWVARIRSKYNNYATYYADSVKDRFTISRDDSKNTAYLQMNNLKTEDTAVYYCVRHGNFGNSY | |
| | | ISYWAYWGQGTLVTVSSGGGGSGGGGSGGGGSQTVVIQEPSLIVSPGGIVTLICGSSIGAVIS | |
| | | GNYPNWVQQKPGQAPRGLIGGTKFLAPGTPARFSGSLLGGKAALTLSGVQPEDEAEYYCVLWY | |
| | | SNRWVFGGGTKLTVLGGGGSQRFVTGHFGGLHPANGHHHHHH | |
| 367. | CH19_6-G8xI2C6-LY-FcB- | QRFVTGHFGGLYPANGGGGGSQVQLVQSGAEVKKPGASVKVSCKASGYTFTYYGISWVRQAPG | |
| | LH | QGLEWMGWINPYTGKTNYAQKVQGRVTMTTDTSTSTAYMELRNLRSDDTAVYYCARGSGGFDY | |
| | | WGQGTLVTVSSGGGGSGGGGSGGGGSDIVMTQTPLSLSVTPGQPASISCRSSQSLLHSVGYNY | |
| | | LDWYLQKPGQSPQLLIYLGSNRASGVPDRFSGSGSGIDFTLKISRVEAEDVGVYYCMQALQIP | |
| | | FTFGPGTKVDIKSGGGGSEVQLVESGGGLVQPGGSLKLSCAASGFTFNKYAMNWVRQAPGKGL | |
| | | EWVARIRSKYNNYATYYADSVKDRFTISRDDSKNTAYLQMNNLKTEDTAVYYCVRHGNFGNSY | |
| | | ISYWAYWGQGTLVTVSSGGGGSGGGGSGGGGSQTVVTQEPSLTVSPGGTVTLTCGSSTGAVTS | |
| | | GNYPNWVQQKPGQAPRGLIGGTKFLAPGTPARFSGSLLGGKAALTLSGVQPEDEAEYYCVLWY | |
| | | SNRWVFGGGTKLTVLGGGGSQRFVTGHFGGLHPANGHHHHHH | |
| 368. | CH19_6-F9xI2C6-LY-FcB- | QRFVTGHFGGLYPANGGGGGSQVQLVQSGAEVKKPGASVKVSCKASGYTFTYYGISWVRQAPG | |
| | LH | QGLEWMGWINPYTGKTNYAQKLQGRVTMTTDTSTSTAYMELRSLRSDDTAVYYCARGSGGFDY | |
| | | WGQGTLVTVSSGGGGSGGGGSGGGGSDIVMTQTPLSLSVTPGQPASISCRSSQSLLHSVGYNY | |
| | | LDWYLQKPGQSPQLLIYLGSNRASGVPDRFSGSGSGTDFTLKISRVEAEDVGVYYCMQALQTP | |
| | | FTFGPGTKVDIKSGGGGSEVQLVESGGGLVQPGGSLKLSCAASGFTFNKYAMNWVRQAPGKGL | |
| | | EWVARIRSKYNNYATYYADSVKDRFTISRDDSKNTAYLQMNNLKTEDTAVYYCVRHGNFGNSY | |
| | | ISYWAYWGQGTLVTVSSGGGGSGGGGSGGGGSQTVVTQEPSLTVSPGGTVTLTCGSSTGAVTS | |
| | | GNYPNWVQQKPGQAPRGLIGGTKFLAPGTPARFSGSLLGGKAALTLSGVQPEDEAEYYCVLWY | |
| | | SNRWVFGGGTKLTVLGGGGSQRFVTGHFGGLHPANGHHHHHH | |
| 369. | CH19_0-C11xI2C6-LY- | QRFVIGHFGGLYPANGGGGGSQVQLVESGGGVVQPGRSLRLSCAASGFTFRNYAMHWVRQAPG | |
| | FcB-LH | KGLEWVAVISYSGNNKYYASSVKGRFTISRDNSKNTLYLQLNSLRAEDTAVYYCAREFYYDST | |
| | | GYDYSTPGDYWGQGTLVTVSSGGGGSGGGGSGGGGSDIQMTQSPSSLSASVGDRVTITCQASQ | |
| | | DISNYLNWYQQKPGKAPKLLIYDASNLEIGVPSRFSGSGSGTDFIFTISSLQPEDIATYYCQQ | |
| | | YDNLPTFGQGTRLEIKSGGGGSEVQLVESGGGLVQPGGSLKLSCAASGFTFNKYAMNWVRQAP | |
| | | GKGLEWVARIRSKYNNYATYYADSVKDRFTISRDDSKNTAYLQMNNLKTEDTAVYYCVRHGNF | |
| | | GNSYISYWAYWGQGTLVIVSSGGGGSGGGGSGGGGSQTVVIQEPSLIVSPGGIVILTCGSSIG | |
| | | AVTSGNYPNWVQQKPGQAPRGLIGGTKFLAPGTPARFSGSLLGGKAALTLSGVQPEDEAEYYC | |
| | | VLWYSNRWVEGGGIKLIVLGGGGSQRFVIGHFGGLHPANGHHHHHH | |
| 370. | CH19_8-F6xI2C6-LY-FcB- | QRFVTGHFGGLYPANGGGGGSQVQLVESGGGVVQPGRSLRLSCVASGFTFRNYAMHWVRQAPG | |
| | LH | KGLEWVAVISYSGNNKYYASSVKGRFTISRDNSKNTLYLQLNSLRAEDTAVYYCAREFYYDST | |
| | | GYDYSTPGDYWGQGTLVTVSSGGGGSGGGGSGGGGSDIQMTQSPSSLSASVGDRVTITCRASQ | |
| | | SISSYLNWYQQKPGKAPKLLIYDASSLQSGVPSRFSGSGSGTEFILTISSLQAEDVAVYYCQQ | |
| | | YYSTPLIFGGGTKVDIKSGGGGSEVQLVESGGGLVQPGGSLKLSCAASGFTFNKYAMNWVRQA | |
| | | PGKGLEWVARIRSKYNNYATYYADSVKDRFTISRDDSKNTAYLQMNNLKTEDTAVYYCVRHGN | |
| | | FGNSYISYWAYWGQGTLVTVSSGGGGSGGGGSGGGGSQTVVTQEPSLTVSPGGTVTLTCGSST | |
| | | GAVTSGNYPNWVQQKPGQAPRGLIGGTKFLAPGTPARFSGSLLGGKAALTLSGVQPEDEAEYY | |
| | | CVLWYSNRWVFGGGTKLTVLGGGGSQRFVTGHFGGLHPANGHHHHHH | |
| 371. | CH19_0-G9xI2C6-LY-FcB- | QRFVIGHFGGLYPANGGGGGSQVQLVESGGGVVQPGRSLRLSCAASGFTFRNYAMHWVRQAPG | |
| | LH | KGLEWVAGISYSGTNKYYASSVKGRFTISRDNSKNTLYLQLNSLRAEDTAVYYCAREFYYDST | |
| | | GYDYSTPGDYWGQGTLVTVSSGGGGSGGGGSGGGGSDIQMTQSPSSLSASVGDRVTITCQASQ | |
| | | DISNYLNWYQQKPGKAPKLLIYDASNLETGVPSRFSGSGSGTEFTLTISSLQPEDIATYYCQQ | |
| | | YDNLPLTFGGGTKVDIKSGGGGSEVQLVESGGGLVQPGGSLKLSCAASGFTFNKYAMNWVRQA | |
| | | PGKGLEWVARIRSKYNNYATYYADSVKDRFTISRDDSKNTAYLQMNNLKTEDTAVYYCVRHGN | |
| | | FGNSYISYWAYWGQGTLVIVSSGGGGSGGGGSGGGGSQTVVIQEPSLIVSPGGIVTLICGSST | |
| | | GAVTSGNYPNWVQQKPGQAPRGLIGGTKFLAPGTPARFSGSLLGGKAALTLSGVQPEDEAEYY | |
| | | CVLWYSNRWVFGGGTKLTVLGGGGSQRFVTGHFGGLHPANGHHHHHH | |
| 372. | CH19_1-E11xI2C6-LY- | QRFVTGHFGGLYPANGGGGGSQVQLVESGGGVVQPGRSLRLSCVASGFTFRNYAMHWVRQAPG | |
| | FcB-LH | KGLEWVAVISYSGNNKYYASSVKGRFTISRDNSKNTLFLQLNSLRAEDTAVYYCAREFYYDST | |
| | | GYDYSTPGNYWGQGTLVTVSSGGGGSGGGGSGGGGSDIQMTQSPSSLSASVGDRVTITCQASQ | |
| | | DISNYLNWYQQKPGKAPKLLIYDASNLETGVPSRFSGSGSGTDFTFTISSLQPEDIATYYCQQ | |
| | | YVNLPLIFGGGTKLEIKSGGGGSEVQLVESGGGLVQPGGSLKLSCAASGFTFNKYAMNWVRQA | |
| | | PGKGLEWVARIRSKYNNYATYYADSVKDRFTISRDDSKNTAYLQMNNLKTEDTAVYYCVRHGN | |
| | | FGNSYISYWAYWGQGTLVTVSSGGGGSGGGGSGGGGSQTVVTQEPSLTVSPGGTVTLTCGSST | |
| | | GAVISGNYPNWVQQKPGQAPRGLIGGTKFLAPGTPARFSGSLLGGKAALTLSGVQPEDEAEYY | |
| | | CVLWYSNRWVFGGGTKLTVLGGGGSQRFVTGHFGGLHPANGHHHHHH | |
| 373. | CH19_0-F5xI2C6-LY-FcB- | QRFVTGHFGGLYPANGGGGGSQVQLVESGGGVVQPGRSLRLSCAASGFTFSYGMQWVRQAPG | |
| | LH | KGLEWVAVIWYSGSNKYYASSVKGRFTISRDNSKNTLYLQMNSLRAEDTAVYYCARDGYPIFY | |
| | | RYYGMDVWGQGTIVIVSSGGGGSGGGGSGGGGSDIQMTQSPSSLSASVGDRVTITCRASQGIS | |
| | | NYLAWYQQKPGKVPKLLIYAASTLQSGVPSRFSGSGSGTDFTLTISSLQPEDVATYYCQKYNS | |
| | | APLTFGGGTKVEIKSGGGGSEVQLVESGGGLVQPGGSLKLSCAASGFTENKYAMNWVRQAPGK | |
| | | GLEWVARIRSKYNNYATYYADSVKDRFTISRDDSKNTAYLQMNNLKTEDTAVYYCVRHGNFGN | |
| | | SYISYWAYWGQGTLVTVSSGGGGSGGGGSGGGGSQTVVTQEPSLTVSPGGTVTLTCGSSTGAV | |
| | | TSGNYPNWVQQKPGQAPRGLIGGTKFLAPGTPARFSGSLLGGKAALTLSGVQPEDEAEYYCVL | |
| | | WYSNRWVFGGGTKLTVLGGGGSQRFVTGHFGGLHPANGHHHHHH | |
| 374. | CH19_1-E1xI2C6-LY-FcB- | QRFVTGHFGGLYPANGGGGGSQVQLVESGGGVVQPGRSLRLSCAASGFTFSSYGMHWVRQAPG | |
| | LH | KGLEWVAVISYSGSNKYYASSVKGRFTISRDNSKNTLYLQMNSLRAEDTAVYYCARDGYPIFY | |
| | | RYYGMDVWGQGTIVIVSSGGGGSGGGGSGGGGSEIVLIQSPGILSLSPGERAILSCRASQSVS | |
| | | SSYLAWYQQKPGQAPRLLIYGASSRATGIPDRFSGSGSGTDFTLIISRLEPEDLAVYYCQQYG | |
| | | TSPLTFGGGTKLEIKSGGGGSEVQLVESGGGLVQPGGSLKLSCAASGFTFNKYAMNWVRQAPG | |
| | | KGLEWVARIRSKYNNYATYYADSVKDRFTISRDDSKNTAYLQMNNLKTEDTAVYYCVRHGNFG | |
| | | NSYISYWAYWGQGTLVTVSSGGGGSGGGGSGGGGSQTVVTQEPSLTVSPGGIVTLICGSSTGA | |
| | | VTSGNYPNWVQQKPGQAPRGLIGGTKFLAPGTPARFSGSLLGGKAALTLSGVQPEDEAEYYCV | |
| | | LWYSNRWVFGGGTKLTVLGGGGSQRFVTGHFGGLHPANGHHHHHH | |
| 375. | CH19_1-E6xI2C6-LY-FcB- | QRFVTGHFGGLYPANGGGGGSQVQLVESGGGVVQPGRSLRLSCAASGFTFSSFGMHWVRQAPG | |
| | LH | KGLEWVAFIWYSGSNKYYASSVKGRVTISRDNSKNTLYLQMNSLRAEDTAVYYCARDGYPIFY | |
| | | YYYGMDVWGQGTIVIVSSGGGGSGGGGSGGGGSEIVLIQSPGILSLSPGERATLSCRASQSVS | |
| | | SSYLAWYQQKPGQAPRLLIYGASSRATGIPDRFSGSGSGTDFTLIISRLEPEDFAVYYCQQYG | |
| | | SSPFTFGPGTRLEIKSGGGGSEVQLVESGGGLVQPGGSLKLSCAASGFTFNKYAMNWVRQAPG | |
| | | KGLEWVARIRSKYNNYATYYADSVKDRFTISRDDSKNTAYLQMNNLKTEDTAVYYCVRHGNFG | |
| | | NSYISYWAYWGQGTLVTVSSGGGGSGGGGSGGGGSQTVVTQEPSLTVSPGGTVTLTCGSSTGA | |
| | | VTSGNYPNWVQQKPGQAPRGLIGGTKFLAPGTPARFSGSLLGGKAALTLSGVQPEDEAEYYCV | |
| | | LWYSNRWVEGGGIKLTVLGGGGSQRFVTGHFGGLHPANGHHHHHH | |
| 376. | CH19_2G6_302_VKGxI2C6- | QRFVTGHFGGLHPANGGGGGSQVQLVESGGGVVQPGGSLRLSCAASGFTFSSYGMHWVRQAPG | |
| | LH-FcB-CH-156 | KGLEWVAFIWYDGSNKYYADSVKGRFTISRDNSKNTLYLQMNSLRAEDTAVYYCARRAGIIGT | |
| | | IGYYYGMDVWGQGTTVTVSSGGGGSGGGGSGGGGSSYELTQPPSVSVSPGQTASITCSGDRLG | |
| | | EKYTSWYQQRPGQSPLLVIYQDTKRPSGIPERFSGSNSGNTATLIISGTQAMDEADYYCQAWE | |
| | | SSTVVFGGGTKLTVLSGGGGSEVQLVESGGGLVQPGGSLKLSCAASGFTFNKYAMNWVRQAPG | |
| | | KGLEWVARIRSKYNNYATYYADSVKDRFTISRDDSKNTAYLQMNNLKTEDTAVYYCVRHGNFG | |
| | | NSYISYWAYWGQGTLVTVSSGGGGSGGGGSGGGGSQTVVTQEPSLTVSPGGTVTLTCGSSTGA | |
| | | VTSGNYPNWVQQKPGQAPRGLIGGTKFLAPGTPARFSGSLLGGKAALTLSGVQPEDEAEYYCV | |
| | | LWYSNRWVFGGGTKLTVLGGGGSQRFCTGHFGGLHPCNGGGGGSGGGSRDWDFDVFGGGTPVG | |
| | | GHHHHHH | |
| 377. | CH19_0-E11xI2C6-LH- | QRFVTGHFGGLHPANGGGGGSQVQLQESGPGLVKPSQTLSLTCTVSGGSISRGGYYWSWIRQH | |
| | FcB-CH-156 | PGKGLEWIGYIFYRGRTYYNPSLKSRVTISVDTSKNQFSLKLSSVTAADTAVYYCARVNSNYG | |
| | | WFDPWGQGTLVTVSSGGGGSGGGGSGGGGSEIVLTQFPGTLSLSPGERATLSCRASQSVSSSY | |
| | | LAWYQQKPGQAPRLLIYGASSRATGIPDRFSGSGSGIDFILTISRLEPEDFAVYYCQQYGSSP | |
| | | LTFGGGTKLEIKSGGGGSEVQLVESGGGLVQPGGSLKLSCAASGFTFNKYAMNWVRQAPGKGL | |
| | | EWVARIRSKYNNYATYYADSVKDRFTISRDDSKNTAYLQMNNLKTEDTAVYYCVRHGNFGNSY | |
| | | ISYWAYWGQGTLVTVSSGGGGSGGGGSGGGGSQTVVTQEPSLTVSPGGTVTLTCGSSTGAVTS | |
| | | GNYPNWVQQKPGQAPRGLIGGTKFLAPGTPARFSGSLLGGKAALTLSGVQPEDEAEYYCVLWY | |
| | | SNRWVFGGGTKLIVLGGGGSQRFCTGHFGGLHPCNGGGGGSGGGSRDWDFDVFGGGTPVGGHH | |
| | | HHHH | |
| 378. | CH19_5-G4xI2C6-LH-FcB- | QRFVTGHFGGLHPANGGGGGSQVQLQESGPGLVKPSQTLSLTCTVSGGSISSGGYYWSWIRQH | |
| | CH-156 | PGKGLEWIGYIFYRGRTYYNPSLKSRVTISVDTSKNQFSLKLSSVTAADTAVYYCARVYSNYG | |
| | | WFDPWGQGTLVTVSSGGGGSGGGGSGGGGSEIVLTQSPGTLSLSPGERATLSCRASQSVSSSY | |
| | | LAWYQQKPGQAPRLLIYGTSNRATGIPDRFSGSGSGTDFTLTISRLEPEDFAVYYCQQYGSSP | |
| | | LTFGGGTKLEIKSGGGGSEVQLVESGGGLVQPGGSLKLSCAASGFTFNKYAMNWVRQAPGKGL | |
| | | EWVARIRSKYNNYATYYADSVKDRFTISRDDSKNTAYLQMNNLKTEDTAVYYCVRHGNFGNSY | |
| | | ISYWAYWGQGTLVTVSSGGGGSGGGGSGGGGSQTVVTQEPSLTVSPGGTVTLTCGSSTGAVTS | |
| | | GNYPNWVQQKPGQAPRGLIGGTKFLAPGTPARFSGSLLGGKAALTLSGVQPEDEAEYYCVLWY | |
| | | SNRWVFGGGTKLTVLGGGGSQRFCTGHFGGLHPCNGGGGGSGGGSRDWDFDVFGGGTPVGGHH | |
| | | HHHH | |
| 379. | CH19_8-H6xI2C6-LH-FcB- | QRFVIGHFGGLHPANGGGGGSQVQLQESGPGLVKPSQTLSLICTVSGGSISSGGYYWSWIRQH | |
| | CH-156 | PGKGLEWIGYIFYSGRTYYNPSLKSRVTISVDTSKNQFSLKLSSVTAADTAVYYCARVYSNYG | |
| | | WFDPWGQGTLVTVSSGGGGSGGGGSGGGGSEIVLTQSPGTLSLSPGERATLSCRASQSVSSSY | |
| | | LAWYQQKPGQAPRLLIYGASSRATGIPDRFSGSGSGTDFTLTISRLEPEDFAVYYCQQYGSSP | |
| | | LTFGGGTKLEIKSGGGGSEVQLVESGGGLVQPGGSLKLSCAASGFTFNKYAMNWVRQAPGKGL | |
| | | EWVARIRSKYNNYATYYADSVKDRFTISRDDSKNTAYLQMNNLKTEDTAVYYCVRHGNFGNSY | |
| | | ISYWAYWGQGTLVTVSSGGGGSGGGGSGGGGSQTVVTQEPSLTVSPGGTVTLTCGSSTGAVTS | |
| | | GNYPNWVQQKPGQAPRGLIGGTKFLAPGTPARFSGSLLGGKAALTLSGVQPEDEAEYYCVLWY | |
| | | SNRWVFGGGTKLTVLGGGGSQRFCTGHFGGLHPCNGGGGGSGGGSRDWDFDVFGGGTPVGGHH | |
| | | HHHH | |
| 380. | CH19_2-C11xI2C6-LH- | QRFVTGHFGGLHPANGGGGGSQVQLQESGPGLVKPSQTLSLTCTVSGGSISSGGYYWSWIRQH | |
| | FcB-CH-156 | PGKGLEWIGYIFYSGRTYYNPSLKSRVTISVDTSKNQFSLKLRSVTAADTAVYYCARVYSNYG | |
| | | WFDPWGQGTLVTVSSGGGGSGGGGSGGGGSEIVLIQSPGILSLSPGERATLSCRASQSVSSSY | |
| | | LAWYQQKPGQAPRLLIYGASSRATGIPDRFSGSGSGIDFILTISRLEPEDFAVYYCQQYGSSP | |
| | | LTFGGGTKLEIKSGGGGSEVQLVESGGGLVQPGGSLKLSCAASGFTFNKYAMNWVRQAPGKGL | |
| | | EWVARIRSKYNNYATYYADSVKDRFTISRDDSKNTAYLQMNNLKTEDTAVYYCVRHGNFGNSY | |
| | | ISYWAYWGQGTLVTVSSGGGGSGGGGSGGGGSQTVVTQEPSLTVSPGGTVTLTCGSSTGAVTS | |
| | | GNYPNWVQQKPGQAPRGLIGGTKFLAPGTPARFSGSLLGGKAALTLSGVQPEDEAEYYCVLWY | |
| | | SNRWVFGGGTKLTVLGGGGSQRFCTGHFGGLHPCNGGGGGSGGGSRDWDFDVFGGGTPVGGHH | |
| | | HHHH | |
| 381. | CH19_2-A10xI2C6-LH- | QRFVTGHFGGLHPANGGGGGSQVQLQESGPGLVKPSQTLSLTCTVSGGSISSGGYYWSWIRQH | |
| | FcB-CH-156 | PGKGLEWIGYIYYSGSTFYNPSLRSRVTISVDTSKNQFSLKLSSVTAADTAVYYCARDSSSSR | |
| | | ALDYWGQGTLVTVSSGGGGSGGGGSGGGGSEIVLIQSPGILSLSPGERATLSCRASQSVSSSY | |
| | | LAWYQQKPGQAPRLLIYGASSRATGIPDRFSGSGSGTDFTLTISRLEPEDFAVYYCQQYDSSP | |
| | | RTFGQGTKLEIKSGGGGSEVQLVESGGGLVQPGGSLKLSCAASGFTFNKYAMNWVRQAPGKGL | |
| | | EWVARIRSKYNNYATYYADSVKDRFTISRDDSKNTAYLQMNNLKTEDTAVYYCVRHGNFGNSY | |
| | | ISYWAYWGQGTLVTVSSGGGGSGGGGSGGGGSQTVVTQEPSLTVSPGGTVTLICGSSTGAVIS | |
| | | GNYPNWVQQKPGQAPRGLIGGTKFLAPGTPARFSGSLLGGKAALTLSGVQPEDEAEYYCVLWY | |
| | | SNRWVFGGGTKLTVLGGGGSQRFCTGHFGGLHPCNGGGGGSGGGSRDWDFDVFGGGTPVGGHH | |
| | | HHHH | |
| 382. | CH19_1-D114xI2C6-LH- | QRFVTGHFGGLHPANGGGGGSQVQLQESGPGLVKPSQTLSLTCTVSGGSISSGGYYWSWIRQH | |
| | FcB-CH-156 | PGKGLEWIGYIYYRGRTYYNPSLKSRVTISVDTSKNQFSLKLSSVTAADTAVYYCARVYSNYG | |
| | | WFDPWGQGTLVTVSSGGGGSGGGGSGGGGSEIVLIQSPGILSLSPGERATLSCRASQSVSSSY | |
| | | LAWYQQKPGQAPRLLIYGASSRATGIPDRFSGSGSGTDFTLTISRLEPEDFAVYYCQQYGSSP | |
| | | LTFGGGTKLEIKSGGGGSEVQLVESGGGLVQPGGSLKLSCAASGFTFNKYAMNWVRQAPGKGL | |
| | | EWVARIRSKYNNYATYYADSVKDRFTISRDDSKNTAYLQMNNLKTEDTAVYYCVRHGNFGNSY | |
| | | ISYWAYWGQGTLVTVSSGGGGSGGGGSGGGGSQTVVTQEPSLTVSPGGTVTLTCGSSTGAVTS | |
| | | GNYPNWVQQKPGQAPRGLIGGTKFLAPGTPARFSGSLLGGKAALTLSGVQPEDEAEYYCVLWY | |
| | | SNRWVFGGGTKLTVLGGGGSQRFCTGHFGGLHPCNGGGGGSGGGSRDWDFDVFGGGTPVGGHH | |
| | | HHHH | |
| 383. | CH19_9-F9xI2C6-LH-FcB- | QRFVTGHFGGLHPANGGGGGSQVQLQESGPGLVKPSETLSLICTVSGGSISSGGYYWSWIRQH | |
| | CH-156 | PGKGLEWIGYIFYRGRTYYNPSLKSRVTISVDTSKNQFSLKLSSVTAADTAVYYCARVYSNYG | |
| | | WFDPWGQGTLVTVSSGGGGSGGGGSGGGGSEIVLTQSPGTLSLSPGERATLSCRASQSVSSSY | |
| | | LAWYQQKPGQAPRLLIYGASSRATGIPDRFSGSGSGTDFTLTISRLEPEDFAVYYCQQYGSSP | |
| | | TFGGGTKVEIKSGGGGSEVQLVESGGGLVQPGGSLKLSCAASGFTFNKYAMNWVRQAPGKGLE | |
| | | WVARIRSKYNNYATYYADSVKDRFTISRDDSKNTAYLQMNNLKTEDTAVYYCVRHGNFGNSYI | |
| | | SYWAYWGQGTLVIVSSGGGGSGGGGSGGGGSQTVVTQEPSLIVSPGGIVTLICGSSTGAVISG | |
| | | NYPNWVQQKPGQAPRGLIGGTKFLAPGTPARFSGSLLGGKAALTLSGVQPEDEAEYYCVLWYS | |
| | | NRWVFGGGTKLTVLGGGGSQRFCTGHFGGLHPCNGGGGGSGGGSRDWDFDVFGGGTPVGGHHH | |
| | | HHH | |
| 384. | CH19_1-H8xI2C6-LH-FcB- | QRFVTGHFGGLHPANGGGGGSQVQLQESGPGLVKPSQTLSLTCTVSGGSISSGGYYWSWIRQH | |
| | CH-156 | PGKGLEWIGYIFYRGRTYYNPSLKSRVTISVDTSKNQFSLKLSSVTAADTAVYYCARVYSNYG | |
| | | WFDPWGQGTLVTVSSGGGGSGGGGSGGGGSEIVLTQSPGTLSLSPGERATLSCRASQSVSSSY | |
| | | LAWYQQKPGQAPRLLIYGASSRATGIPDRFSGSGSGIDFILTISRLEPEDFAVYYCQQYGSSP | |
| | | LTFGGGTKVEIKSGGGGSEVQLVESGGGLVQPGGSLKLSCAASGFTFNKYAMNWVRQAPGKGL | |
| | | EWVARIRSKYNNYATYYADSVKDRFTISRDDSKNTAYLQMNNLKTEDTAVYYCVRHGNFGNSY | |
| | | ISYWAYWGQGTLVTVSSGGGGSGGGGSGGGGSQTVVTQEPSLTVSPGGTVTLTCGSSTGAVTS | |
| | | GNYPNWVQQKPGQAPRGLIGGTKFLAPGTPARFSGSLLGGKAALTLSGVQPEDEAEYYCVLWY | |
| | | SNRWVFGGGTKLIVLGGGGSQRFCTGHFGGLHPCNGGGGGSGGGSRDWDFDVFGGGTPVGGHH | |
| | | HHHH | |
| 385. | CH19_1-B12xI2C6-LH- | QRFVTGHFGGLHPANGGGGGSQVQLQESGPGLVKPSQTLSLTCTVSGGSISSGGYYWSWIRQH | |
| | FcB-CH-156 | PGKGLEWIGYIYYRGRTYYNPSLKSRVTISVDTSKNQFSLKLSSVTAADTAVYYCARVYSNYG | |
| | | WFDPWGQGTLVTVSSGGGGSGGGGSGGGGSEIVLTQSPGTLSLSPGERATLSCRASQSVSSSY | |
| | | LAWYQQKPGQAPRLLIYGASSRATGIPDRFSGSGSGIDFILTISRLEPEDFAVYYCQQYGSSP | |
| | | TFGPGTKVEIKSGGGGSEVQLVESGGGLVQPGGSLKLSCAASGFTFNKYAMNWVRQAPGKGLE | |
| | | WVARIRSKYNNYATYYADSVKDRFTISRDDSKNTAYLQMNNLKTEDTAVYYCVRHGNFGNSYI | |
| | | SYWAYWGQGTLVTVSSGGGGSGGGGSGGGGSQTVVTQEPSLTVSPGGTVTLTCGSSTGAVTSG | |
| | | NYPNWVQQKPGQAPRGLIGGTKFLAPGTPARFSGSLLGGKAALTLSGVQPEDEAEYYCVLWYS | |
| | | NRWVFGGGTKLTVLGGGGSQRFCTGHFGGLHPCNGGGGGSGGGSRDWDFDVFGGGTPVGGHHH | |
| | | HHH | |
| 386. | CH19_0-C4xI2C6-LH-FcB- | QRFVTGHFGGLHPANGGGGGSQVQLQESGPGLVKPSQTLSLTCTVSGGSISSGGYYWSWIRQH | |
| | CH-156 | PGKGLEWIGYIYYRGRTYYNPSLKSRVTISVDTSKNQFSLKLSSVTAADTAVYYCARVYSNYG | |
| | | WFDPWGQGTLVTVSSGGGGSGGGGSGGGGSEIVLTQSPGTLSLSPGERATLSCRASQSVSSSY | |
| | | LAWYQQKPGQAPRLLIYGASSRATGIPDRFSGSGSGIDFILTISRLEPEDFAVYYCQQYGSSP | |
| | | TFGGGTKVEIKSGGGGSEVQLVESGGGLVQPGGSLKLSCAASGFTFNKYAMNWVRQAPGKGLE | |
| | | WVARIRSKYNNYATYYADSVKDRFTISRDDSKNTAYLQMNNLKTEDTAVYYCVRHGNFGNSYI | |
| | | SYWAYWGQGTLVTVSSGGGGSGGGGSGGGGSQTVVTQEPSLTVSPGGTVTLTCGSSTGAVTSG | |
| | | NYPNWVQQKPGQAPRGLIGGIKFLAPGTPARFSGSLLGGKAALTLSGVQPEDEAEYYCVLWYS | |
| | | NRWVFGGGTKLTVLGGGGSQRFCTGHFGGLHPCNGGGGGSGGGSRDWDFDVFGGGTPVGGHHH | |
| | | HHH | |
| 387. | CH19_3-F2xI2C6-LH-FcB- | QRFVTGHFGGLHPANGGGGGSQVQLQESGPGLVKPSQTLSLTCTISGGSISSGGYYWSWIRQH | |
| | CH-156 | PGKGLEWIGYIFYSGRTYYNPSLKSRVTISVDTSKNQFSLKLTSVTAADTAVYYCARVNSNYG | |
| | | WFDPWGQGTLVTVSSGGGGSGGGGSGGGGSEIVLIQSPGILSLSPGERATLSCRASQSVSSSY | |
| | | LAWYQQKPGQAPRLLIYGASSRATGIPDRFSGSGSGTDFTLTISRLEPEDFAVYYCQQYGSSP | |
| | | TFGGGTKVEIKSGGGGSEVQLVESGGGLVQPGGSLKLSCAASGFIFNKYAMNWVRQAPGKGLE | |
| | | WVARIRSKYNNYATYYADSVKDRFTISRDDSKNTAYLQMNNLKTEDTAVYYCVRHGNFGNSYI | |
| | | SYWAYWGQGTLVTVSSGGGGSGGGGSGGGGSQTVVTQEPSLTVSPGGTVTLTCGSSTGAVTSG | |
| | | NYPNWVQQKPGQAPRGLIGGTKFLAPGTPARFSGSLLGGKAALTLSGVQPEDEAEYYCVLWYS | |
| | | NRWVFGGGTKLTVLGGGGSQRFCTGHFGGLHPCNGGGGGSGGGSRDWDFDVFGGGTPVGGHHH | |
| | | HHH | |
| 388. | CH19_3-B10xI2C6-LH- | QRFVTGHFGGLHPANGGGGGSQVQLQESGPGLVKPSQTLSLTCTVSGGSISSGGYYWSWIRQH | |
| | FcB-CH-156 | PGKGLDWIGYIFYRGRTYYNPSLKSRVTISVDTSKNQFSLKLSSVTAADTAVYYCARVNSNYG | |
| | | WFDPWGQGTLVTVSSGGGGSGGGGSGGGGSEIVLTQSPGTLSLSPGERATLSCRASQSVSSSY | |
| | | LAWYQQKPGQAPRLLIYGASSRATGIPDRFSGSGSGIDFILTISRLEPEDFAVYYCQQYGSSP | |
| | | LTFGGGTKVEIKSGGGGSEVQLVESGGGLVQPGGSLKLSCAASGFTFNKYAMNWVRQAPGKGL | |
| | | EWVARIRSKYNNYATYYADSVKDRFTISRDDSKNTAYLQMNNLKTEDTAVYYCVRHGNFGNSY | |
| | | ISYWAYWGQGTLVTVSSGGGGSGGGGSGGGGSQTVVIQEPSLIVSPGGIVTLICGSSTGAVIS | |
| | | GNYPNWVQQKPGQAPRGLIGGTKFLAPGTPARFSGSLLGGKAALTLSGVQPEDEAEYYCVLWY | |
| | | SNRWVFGGGTKLTVLGGGGSQRFCTGHFGGLHPCNGGGGGSGGGSRDWDFDVFGGGTPVGGHH | |
| | | HHHH | |
| 389. | CH19_0-G4xI2C6-LH-FcB- | QRFVTGHFGGLHPANGGGGGSQVQLQESGPGLVKPSQTLSLTCTVSGGSISSGGYYWSWIRQH | |
| | CH-156 | PGKGLEWIGYIYYRGRTYYNPSLKSRVTISVDTSKNQFSLKLSSVTAADTAVYYCARVYSNYG | |
| | | WFDPWGQGTLVTVSSGGGGSGGGGSGGGGSEIVLIQSPGILSLSPGERATLSCRASQSVSSSY | |
| | | LAWYQQKPGQAPRLLIYGASTRATGIPDRFSGSGSGIDFILTISRLEPEDFAVYYCQQYGSSP | |
| | | SFGQGTKVEIKSGGGGSEVQLVESGGGLVQPGGSLKLSCAASGFTFNKYAMNWVRQAPGKGLE | |
| | | WVARIRSKYNNYATYYADSVKDRFTISRDDSKNTAYLQMNNLKTEDTAVYYCVRHGNFGNSYI | |
| | | SYWAYWGQGTLVTVSSGGGGSGGGGSGGGGSQTVVTQEPSLTVSPGGTVTLTCGSSTGAVTSG | |
| | | NYPNWVQQKPGQAPRGLIGGTKFLAPGTPARFSGSLLGGKAALTLSGVQPEDEAEYYCVLWYS | |
| | | NRWVFGGGTKLTVLGGGGSQRFCTGHFGGLHPCNGGGGGSGGGSRDWDFDVFGGGTPVGGHHH | |
| | | HHH | |
| 390. | CH19_0-H5xI2C6-LH-FcB- | QRFVTGHFGGLHPANGGGGGSQVQLQESGPGLVRPSQTLSLTCTVSGGSISSGGYYWSWIRQH | |
| | CH-156 | PGKGLEWIGYIYYRGRTYYNPSLKSRVTISVDTSKNQFSLKLSSVTAADTAVYYCARVYSNYG | |
| | | WFDPWGQGTLVTVSSGGGGSGGGGSGGGGSEIVLIQSPGILSLSPGERATLSCRASQSVSSSY | |
| | | LAWYQQKPGQAPRLLIYGASSRATGIPDRFSGSGSGTDFTLTISRLEPEDFAVYYCQQYDTSP | |
| | | LTFGGGTKVEIKSGGGGSEVQLVESGGGLVQPGGSLKLSCAASGFTFNKYAMNWVRQAPGKGL | |
| | | EWVARIRSKYNNYATYYADSVKDRFTISRDDSKNTAYLQMNNLKTEDTAVYYCVRHGNFGNSY | |
| | | ISYWAYWGQGTLVTVSSGGGGSGGGGSGGGGSQTVVTQEPSLTVSPGGTVTLTCGSSTGAVTS | |
| | | GNYPNWVQQKPGQAPRGLIGGTKFLAPGTPARFSGSLLGGKAALTLSGVQPEDEAEYYCVLWY | |
| | | SNRWVFGGGTKLTVLGGGGSQRFCTGHFGGLHPCNGGGGGSGGGSRDWDFDVFGGGTPVGGHH | |
| | | HHHH | |
| 391. | CH19_0-B8xI2C6-LH-FcB- | QRFVTGHFGGLHPANGGGGGSQVQLQESGPGLVKPSQTLSLTCTVSGGSISSGGYYWSWIRQH | |
| | CH-156 | PGKGLEWIGYIYYRGRTYYNPSLKSRVTISVDTSKNQFSLKLSSVTAADTAVYYCARVYSNYG | |
| | | WFDPWGQGTLVTVSSGGGGSGGGGSGGGGSEIVLIQSPGILSLSPGERATLSCRASQSVSSSY | |
| | | LAWYQQKPGQAPRLLIYGASSRATGIPDRFSGSGSGTDFTLTISRLEPEDFAVYYCQQYGSSP | |
| | | TFGGGTKVEIKSGGGGSEVQLVESGGGLVQPGGSLKLSCAASGFTFNKYAMNWVRQAPGKGLE | |
| | | WVARIRSKYNNYATYYADSVKDRFTISRDDSKNTAYLQMNNLKTEDTAVYYCVRHGNFGNSYI | |
| | | SYWAYWGQGTLVTVSSGGGGSGGGGSGGGGSQTVVTQEPSLTVSPGGTVTLTCGSSTGAVTSG | |
| | | NYPNWVQQKPGQAPRGLIGGTKFLAPGTPARFSGSLLGGKAALTLSGVQPEDEAEYYCVLWYS | |
| | | NRWVFGGGTKLTVLGGGGSQRFCTGHFGGLHPCNGGGGGSGGGSRDWDFDVFGGGTPVGGHHH | |
| | | HHH | |
| 392. | CH19_2-D9xI2C6-LH-FcB- | QRFVTGHFGGLHPANGGGGGSQVQLQESGPGLVKPSQTLSLICTVSGGSISSGGYYWSWIRQH | |
| | CH-156 | PGKGLEWIGYIYYRGRTYYNPSLKSRVTISVDTSKNQFSLKLSSVTAADTAVYYCARVYSNYG | |
| | | WFDPWGQGTLVTVSSGGGGSGGGGSGGGGSEIVLIQSPGILSLSPGERATLSCRASQSVSSSY | |
| | | LAWYQQKPGQAPRLLIYGASSRATGIPDRFSGSGSGTDFTLTISRLEPEDFAVYYCQQYGSSP | |
| | | LTFGGGTKVEIKSGGGGSEVQLVESGGGLVQPGGSLKLSCAASGFTFNKYAMNWVRQAPGKGL | |
| | | EWVARIRSKYNNYATYYADSVKDRFTISRDDSKNTAYLQMNNLKTEDTAVYYCVRHGNFGNSY | |
| | | ISYWAYWGQGTLVTVSSGGGGSGGGGSGGGGSQTVVIQEPSLIVSPGGIVTLICGSSTGAVIS | |
| | | GNYPNWVQQKPGQAPRGLIGGTKFLAPGTPARFSGSLLGGKAALTLSGVQPEDEAEYYCVLWY | |
| | | SNRWVFGGGTKLIVLGGGGSQRFCTGHFGGLHPCNGGGGGSGGGSRDWDFDVFGGGTPVGGHH | |
| | | HHHH | |
| 393. | CH19_8-H7xI2C6-LH-FcB- | QRFVTGHFGGLHPANGGGGGSQVQLQESGPGLVKPSQTLSLTCTVSGGSISSGGYYWSWVRQH | |
| | CH-156 | PGKGLEWIGYIFYSGRTYYNPSLKSRVIISVDTSKNQFSLKLSSVTAADTAVYYCARVYSNYG | |
| | | WFDPWGQGTLVTVSSGGGGSGGGGSGGGGSEIVLTQSPGTLSLSPGERATLSCRASQSVSSSY | |
| | | LAWYQQKPGQAPRLLIYGASSRATGIPDRFSGSGSGIDFILTISRLEPEDFAVYYCQQYGSSP | |
| | | LTFGGGTKVEIKSGGGGSEVQLVESGGGLVQPGGSLKLSCAASGFTFNKYAMNWVRQAPGKGL | |
| | | EWVARIRSKYNNYATYYADSVKDRFTISRDDSKNTAYLQMNNLKTEDTAVYYCVRHGNFGNSY | |
| | | ISYWAYWGQGTLVTVSSGGGGSGGGGSGGGGSQTVVTQEPSLTVSPGGTVTLTCGSSTGAVTS | |
| | | GNYPNWVQQKPGQAPRGLIGGTKFLAPGTPARFSGSLLGGKAALTLSGVQPEDEAEYYCVLWY | |
| | | SNRWVFGGGTKLTVLGGGGSQRFCTGHFGGLHPCNGGGGGSGGGSRDWDFDVFGGGTPVGGHH | |
| | | HHHH | |
| 394. | CH19_9-C2xI2C6-LH-FcB- | QRFVTGHFGGLHPANGGGGGSQVQLQESGPGLVKPSQTLSLTCTVSGGSISSGGYYWSWIRQH | |
| | CH-156 | PGKGLEWIGYIFYSGRTYYNPSLKSRVTISVDTSKNQFSLKLSSVTAADTAVYYCARVYSNYG | |
| | | WFDPWGQGTLVTVSSGGGGSGGGGSGGGGSEIVLTQSPGTLSLSPGERATLSCRASQSVSSSY | |
| | | LAWYQQKPGQAPRLLIYGASSRATGIPDRFSGSGSGTDFTLTISRLEPEDFAVYYCQQYGSSP | |
| | | LTFGGGTKVEIKSGGGGSEVQLVESGGGLVQPGGSLKLSCAASGFTFNKYAMNWVRQAPGKGL | |
| | | EWVARIRSKYNNYATYYADSVKDRFTISRDDSKNTAYLQMNNLKTEDTAVYYCVRHGNFGNSY | |
| | | ISYWAYWGQGTLVTVSSGGGGSGGGGSGGGGSQTVVTQEPSLTVSPGGTVTLTCGSSTGAVTS | |
| | | GNYPNWVQQKPGQAPRGLIGGTKFLAPGTPARFSGSLLGGKAALTLSGVQPEDEAEYYCVLWY | |
| | | SNRWVFGGGTKLTVLGGGGSQRFCTGHFGGLHPCNGGGGGSGGGSRDWDFDVFGGGTPVGGHH | |
| | | HHHH | |
| 395. | CH19_3-D5xI2C6-LH-FcB- | QRFVTGHFGGLHPANGGGGGSQVQLQESGPGLVKPSQTLSLTCTVSGGSISSGGYYWSWIRQH | |
| | CH-156 | PGKGLEWIGYIFYSGRTYYNPSLKSRVSISVDTSKNQFSLKLSSVTAADTAVYYCARVYSNYG | |
| | | WFDPWGQGTLVTVSSGGGGSGGGGSGGGGSEIVLTQSPGTLSLSPGERATLSCRASQSVSSSY | |
| | | LAWYQQKPGQAPRLLIYGASSRATGIPDRFSGSGSGTDFTLTISRLEPEDFAVYYCQQYGSSP | |
| | | LTFGGGTKVEIKSGGGGSEVQLVESGGGLVQPGGSLKLSCAASGFTFNKYAMNWVRQAPGKGL | |
| | | EWVARIRSKYNNYATYYADSVKDRFTISRDDSKNTAYLQMNNLKTEDTAVYYCVRHGNFGNSY | |
| | | ISYWAYWGQGTLVTVSSGGGGSGGGGSGGGGSQTVVTQEPSLTVSPGGTVTLTCGSSTGAVTS | |
| | | GNYPNWVQQKPGQAPRGLIGGTKFLAPGTPARFSGSLLGGKAALTLSGVQPEDEAEYYCVLWY | |
| | | SNRWVFGGGTKLTVLGGGGSQRFCTGHFGGLHPCNGGGGGSGGGSRDWDFDVFGGGTPVGGHH | |
| | | HHHH | |
| 396. | CH19_1-G11xI2C6-LH- | QRFVIGHFGGLHPANGGGGGSQVQLQESGPGLVKPSETLSLICTVSGGSVSSGGYYWSWIRQP | |
| | FcB-CH-156 | PGKGLEWIGYIYYRGRTYYNPSLKSRVTISVDTSKNQFSLKLSSVTAADTAVYYCARVYSNYG | |
| | | WFDPWGQGTLVTVSSGGGGSGGGGSGGGGSEIVLTQSPGTLSLSPGERATLSCRASQSVSSSY | |
| | | LAWYQQKPGQAPRLLIYGASSRATGIPDRFSGSGSGTDFTLTISRLEPEDFAVYYCQQYGSSP | |
| | | LTFGGGTKVEIKSGGGGSEVQLVESGGGLVQPGGSLKLSCAASGFTFNKYAMNWVRQAPGKGL | |
| | | EWVARIRSKYNNYATYYADSVKDRFTISRDDSKNTAYLQMNNLKTEDTAVYYCVRHGNFGNSY | |
| | | ISYWAYWGQGTLVTVSSGGGGSGGGGSGGGGSQTVVIQEPSLIVSPGGIVTLICGSSTGAVIS | |
| | | GNYPNWVQQKPGQAPRGLIGGTKFLAPGTPARFSGSLLGGKAALTLSGVQPEDEAEYYCVLWY | |
| | | SNRWVFGGGTKLTVLGGGGSQRFCTGHFGGLHPCNGGGGGSGGGSRDWDFDVFGGGTPVGGHH | |
| | | HHHH | |
| 397. | CH19_1-H11xI2C6-LH- | QRFVTGHFGGLHPANGGGGGSQVQLQESGPGLVKPSQTLSLTCTVSGGSISSGGYYWSWIRQH | |
| | FcB-CH-156 | PGKGLEWIGYIYYRGRTYYNPSLKSRVTISVDTSKNQFSLKLSSVTAADTAVYYCARVYSNYG | |
| | | WFDPWGQGTLVTVSSGGGGSGGGGSGGGGSEIVLIQSPGILSLSPGERATLSCRASQSVSSSY | |
| | | LAWYQQKPGQAPRLLIYGASSRATGIPDRFSGSGSGIDFILTISRLEPEDFAVYYCQQYGSSP | |
| | | TFGQGTRLEIKSGGGGSEVQLVESGGGLVQPGGSLKLSCAASGFTFNKYAMNWVRQAPGKGLE | |
| | | WVARIRSKYNNYATYYADSVKDRFTISRDDSKNTAYLQMNNLKTEDTAVYYCVRHGNFGNSYI | |
| | | SYWAYWGQGTLVTVSSGGGGSGGGGSGGGGSQTVVTQEPSLTVSPGGTVTLTCGSSTGAVTSG | |
| | | NYPNWVQQKPGQAPRGLIGGTKFLAPGTPARFSGSLLGGKAALTLSGVQPEDEAEYYCVLWYS | |
| | | NRWVFGGGTKLTVLGGGGSQRFCTGHFGGLHPCNGGGGGSGGGSRDWDFDVFGGGTPVGGHHH | |
| | | HHH | |
| 398. | CH19_9-F3xI2C6-LH-FcB- | QRFVTGHFGGLHPANGGGGGSQVQLQESGPGLVKPSQTLSLTCTVSGGSISSGGYYWSWIRQH | |
| | CH-156 | PGKGLEWIGYIFYSGKTYYNPSLKSRVSISVDTSKNQFSLKLSSVTAADTAVYYCARVYSNYG | |
| | | WFDPWGQGTLVTVSSGGGGSGGGGSGGGGSEIVLIQSPGILSLSPGERATLSCRASQSVSSSY | |
| | | LAWYQQKPGQAPRLLIYGASSRATGIPDRFSGSGSGTDFTLTISRLEPEDFAVYYCQQYGSSP | |
| | | ITFGQGTRLEIKSGGGGSEVQLVESGGGLVQPGGSLKLSCAASGFTFNKYAMNWVRQAPGKGL | |
| | | EWVARIRSKYNNYATYYADSVKDRFTISRDDSKNTAYLQMNNLKTEDTAVYYCVRHGNFGNSY | |
| | | ISYWAYWGQGTLVTVSSGGGGSGGGGSGGGGSQTVVTQEPSLTVSPGGTVTLTCGSSTGAVTS | |
| | | GNYPNWVQQKPGQAPRGLIGGTKFLAPGTPARFSGSLLGGKAALTLSGVQPEDEAEYYCVLWY | |
| | | SNRWVFGGGTKLTVLGGGGSQRFCTGHFGGLHPCNGGGGGSGGGSRDWDFDVFGGGTPVGGHH | |
| | | HHHH | |
| 399. | CH19_2-G6xI2C6-LH-FcB- | QRFVTGHFGGLHPANGGGGGSQVQLQESGPGLVKPSETLSLTCTVSGGSISSYYWSWIRQPPG | |
| | CH-156 | KGLEWIGYIYYSGSTNYNPSLKSRVTMSIDTSKNQFSLKLISVTAADTAVYYCARDQRRIVAA | |
| | | GGYYYGMDVWGQGTIVIVSSGGGGSGGGGSGGGGSEIVLIQSPGILSLSPGERATLSCRASQS | |
| | | VSSSYLAWYQQKPGQAPRLLIYGASTRATGIPARFSGSGSGTDFILTISRLEPEDFAVYYCQQ | |
| | | YGSSPFTFGPGTKVDIKSGGGGSEVQLVESGGGLVQPGGSLKLSCAASGFTFNKYAMNWVRQA | |
| | | PGKGLEWVARIRSKYNNYATYYADSVKDRFTISRDDSKNTAYLQMNNLKTEDTAVYYCVRHGN | |
| | | FGNSYISYWAYWGQGTLVTVSSGGGGSGGGGSGGGGSQTVVTQEPSLTVSPGGTVTLTCGSST | |
| | | GAVTSGNYPNWVQQKPGQAPRGLIGGTKFLAPGTPARFSGSLLGGKAALTLSGVQPEDEAEYY | |
| | | CVLWYSNRWVFGGGTKLTVLGGGGSQRFCTGHFGGLHPCNGGGGGSGGGSRDWDFDVFGGGIP | |
| | | VGGHHHHHH | |
| 400. | CH19_2-H7xI2C6-LH-FcB- | QRFVTGHFGGLHPANGGGGGSQVQLQESGPGLVKPSQTLSLTCTVSGGSISSNDYYWSWIRQH | |
| | CH-156 | PGKGLEWIGYIYYSGSTFYNPSLKSRGAISVDTSKNQFSLKLTSVTAADTAVYYCARGVYRIG | |
| | | AFDIWGQGTMVTVSSGGGGSGGGGSGGGGSDIQMTQSPSSLSASVGDRVTITCRASQSISSYL | |
| | | NWYQQKPGKAPKSLIYAASSLQSGVPSKFSGSGSGTDFTLTISSLQPEDIATYYCQQSYSTPQ | |
| | | AFGGGTKVDIKSGGGGSEVQLVESGGGLVQPGGSLKLSCAASGFTFNKYAMNWVRQAPGKGLE | |
| | | WVARIRSKYNNYATYYADSVKDRFTISRDDSKNTAYLQMNNLKTEDTAVYYCVRHGNFGNSYI | |
| | | SYWAYWGQGTLVTVSSGGGGSGGGGSGGGGSQTVVTQEPSLTVSPGGTVTLTCGSSTGAVTSG | |
| | | NYPNWVQQKPGQAPRGLIGGTKFLAPGTPARFSGSLLGGKAALTLSGVQPEDEAEYYCVLWYS | |
| | | NRWVFGGGTKLTVLGGGGSQRFCTGHFGGLHPCNGGGGGSGGGSRDWDFDVFGGGTPVGGHHH | |
| | | HHH | |
| 401. | CH19_5-B3xI2C6-LH-FcB- | QRFVTGHFGGLHPANGGGGGSQVQLVQSGAEVKKPGASVKVSCKASGYTFTYYGISWVRQAPG | |
| | CH-156 | QGLEWMGWINPYGGETNYAQKLQGRVTMTTDTSTSTAYMELRSLRSDDTAVYYCARGSGGFDY | |
| | | WGQGILVTVSSGGGGSGGGGSGGGGSDIVMTQTPLSLSVTPGEPASISCRSSQSLLHSNGYNY | |
| | | LDWYLQKPGQSPQLLTYLGSYRASGVPDRFSGSGSGTDFTLKISRVEAEDVGVYYCMQALQTP | |
| | | FTFGPGTKVDIKSGGGGSEVQLVESGGGLVQPGGSLKLSCAASGFTFNKYAMNWVRQAPGKGL | |
| | | EWVARIRSKYNNYATYYADSVKDRFTISRDDSKNTAYLQMNNLKTEDTAVYYCVRHGNFGNSY | |
| | | GNYPNWVQQKPGQAPRGLIGGTKFLAPGTPARFSGSLLGGKAALTLSGVQPEDEAEYYCVLWY | |
| | | SNRWVFGGGTKLIVLGGGGSQRFCTGHFGGLHPCNGGGGGSGGGSRDWDFDVFGGGTPVGGHH | |
| | | HHHH | |
| 402. | CH19_5-E10xI2C6-LH- | QRFVTGHFGGLHPANGGGGGSQVQLVQSGAEVKKPGASVKVSCKASGYTFTYYGISWVRQAPG | |
| | FcB-CH-156 | QGLEWMGWINPYSGATNYAQKLQGRVTMTTDTSTSTAYMELRSLRSDDTAVYYCARGSGGFDY | |
| | | WGQGTLVTVSSGGGGSGGGGSGGGGSDIVMTQTPLSLSVTPGEPASISCRSSQSLLHSNGYNY | |
| | | LDWYLQKPGQSPQLLTYLGSYRASGVPDRFSGSGSGIDFTLKISRVEAEDVGVYYCMQALQTP | |
| | | FTFGPGTKVDIKSGGGGSEVQLVESGGGLVQPGGSLKLSCAASGFTFNKYAMNWVRQAPGKGL | |
| | | EWVARIRSKYNNYATYYADSVKDRFTISRDDSKNTAYLQMNNLKTEDTAVYYCVRHGNFGNSY | |
| | | ISYWAYWGQGTLVTVSSGGGGSGGGGSGGGGSQTVVTQEPSLTVSPGGTVTLTCGSSTGAVTS | |
| | | GNYPNWVQQKPGQAPRGLIGGTKFLAPGTPARFSGSLLGGKAALTLSGVQPEDEAEYYCVLWY | |
| | | SNRWVFGGGTKLTVLGGGGSQRFCTGHFGGLHPCNGGGGGSGGGSRDWDFDVFGGGTPVGGHH | |
| | | HHHH | |
| 403. | CH19_6-G10xI2C6-LH- | QRFVTGHFGGLHPANGGGGGSQVQLVQSGAEVKKPGASVKVSCKASGYTFTYYGISWVRQAPG | |
| | FcB-CH-156 | QGLEWMGWINPYTGKTNYAQKLQGRVTMTTDTSTSTAYMELRSLRSDDTAVYYCARGSGGFDY | |
| | | WGQGILVTVSSGGGGSGGGGSGGGGSDIVMTQTPLSLSVTPGEPASISCRSSQSLLHSNGYNY | |
| | | LDWYLQKPGQSPQLLTYLGSYRASGVPDRFSGSGSGTDFTLKISRVEAEDVGVYYCMQALQTP | |
| | | FTFGPGTKVDIKSGGGGSEVQLVESGGGLVQPGGSLKLSCAASGFTFNKYAMNWVRQAPGKGL | |
| | | EWVARIRSKYNNYATYYADSVKDRFTISRDDSKNTAYLQMNNLKTEDTAVYYCVRHGNFGNSY | |
| | | ISYWAYWGQGTLVTVSSGGGGSGGGGSGGGGSQTVVTQEPSLTVSPGGTVTLTCGSSTGAVTS | |
| | | GNYPNWVQQKPGQAPRGLIGGTKFLAPGTPARFSGSLLGGKAALTLSGVQPEDEAEYYCVLWY | |
| | | SNRWVFGGGTKLTVLGGGGSQRFCTGHFGGLHPCNGGGGGSGGGSRDWDFDVFGGGTPVGGHH | |
| | | HHHH | |
| 404. | CH19_4-H8xI2C6-LH-FcB- | QRFVTGHFGGLHPANGGGGGSQVQLVQSGAEVKKPGASVKVSCKASGYTFTYYGISWVRQAPG | |
| | CH-156 | QGLEWMGWINPYIGKTNYAQKLQGRVIMITDTSTSTAYMELRSLRSDDTAVYYCARGSGGFDY | |
| | | WGQGILVTVSSGGGGSGGGGSGGGGSDIVMTQTPLSLSVTPGEPASISCRSSQSLLHSVGYNY | |
| | | LDWYLQKPGQSPQLLTYLGSYRASGVPDRFSGSGSGTDFTLKISRVEAEDVGVYYCMQALQTP | |
| | | FTFGPGTKVDIKSGGGGSEVQLVESGGGLVQPGGSLKLSCAASGFTFNKYAMNWVRQAPGKGL | |
| | | EWVARIRSKYNNYATYYADSVKDRFTISRDDSKNTAYLQMNNLKTEDTAVYYCVRHGNFGNSY | |
| | | ISYWAYWGQGTLVTVSSGGGGSGGGGSGGGGSQTVVTQEPSLTVSPGGTVTLTCGSSTGAVTS | |
| | | GNYPNWVQQKPGQAPRGLIGGTKFLAPGTPARFSGSLLGGKAALTLSGVQPEDEAEYYCVLWY | |
| | | SNRWVFGGGTKLIVLGGGGSQRFCTGHFGGLHPCNGGGGGSGGGSRDWDFDVFGGGTPVGGHH | |
| | | HHHH | |
| 405. | CH19_2-E4xI2C6-LH-FcB- | QRFVTGHFGGLHPANGGGGGSQVQLVQSGAEVKKPGASVKVSCKASGYTFTSYGISWVRQAPG | |
| | CH-156 | QGLEWMGWINPYIGNRNYAQKVQDRVIMITDTSTNTAYMELSSLRSDDTAVYYCARGSGGFDY | |
| | | WGQGTLVTVSSGGGGSGGGGSGGGGSDIVMTQSPLSLPVTLGQPASISCRSSQSLLHSVGYNY | |
| | | LDWYLQKPGQSPQLLTYLGSNRASGVPDRFSGSGSGTDFTLKISRVEAEDVGVYYCMQALQTP | |
| | | FTFGPGTKLEIKSGGGGSEVQLVESGGGLVQPGGSLKLSCAASGFTFNKYAMNWVRQAPGKGL | |
| | | EWVARIRSKYNNYATYYADSVKDRFTISRDDSKNTAYLQMNNLKTEDTAVYYCVRHGNFGNSY | |
| | | ISYWAYWGQGTLVTVSSGGGGSGGGGSGGGGSQTVVIQEPSLIVSPGGIVTLICGSSTGAVIS | |
| | | GNYPNWVQQKPGQAPRGLIGGTKFLAPGTPARFSGSLLGGKAALTLSGVQPEDEAEYYCVLWY | |
| | | SNRWVFGGGTKLTVLGGGGSQRFCTGHFGGLHPCNGGGGGSGGGSRDWDFDVFGGGTPVGGHH | |
| | | HHHH | |
| 406. | CH19_6-B8xI2C6-LH-FcB- | QRFVIGHFGGLHPANGGGGGSQVQLVQSGAEVKKPGASVKVSCKASGYTFTYYGISWVRQAPG | |
| | CH-156 | QGLEWMGWINPYTGKTNYAQKLQDRVTMTTDTSTNTAYMELRSLRSDDTAVYYCARGSGGFDY | |
| | | WGQGTLVTVSSGGGGSGGGGSGGGGSDIVMTQTPLSLPVTPGEPASISCRSSQSLLHSVGYNY | |
| | | LDWYLQKPGQSPQLLIYLGSNRASGVPDRFSGSGSGIDFTLKISRVEAEDVGVYYCMQALQTP | |
| | | FTFGPGTKVDIKSGGGGSEVQLVESGGGLVQPGGSLKLSCAASGFTFNKYAMNWVRQAPGKGL | |
| | | EWVARIRSKYNNYATYYADSVKDRFTISRDDSKNTAYLQMNNLKTEDTAVYYCVRHGNFGNSY | |
| | | ISYWAYWGQGTLVTVSSGGGGSGGGGSGGGGSQTVVTQEPSLTVSPGGTVTLTCGSSTGAVTS | |
| | | GNYPNWVQQKPGQAPRGLIGGTKFLAPGTPARFSGSLLGGKAALTLSGVQPEDEAEYYCVLWY | |
| | | SNRWVFGGGTKLTVLGGGGSQRFCTGHFGGLHPCNGGGGGSGGGSRDWDFDVFGGGTPVGGHH | |
| | | HHHH | |
| 407. | CH19_0-B4xI2C6-LH-FcB- | QRFVTGHFGGLHPANGGGGGSQVQLVQSGAEVKKPGASVKVSCKASGYTFTTYGISWVRQAPG | |
| | CH-156 | QGLEWMGWINPYTGKTNYAQKLQGRVTMATDTSTSTAYMELRSLRSDDTAVYYCARGSGGFDY | |
| | | WGQGTLVTVSSGGGGSGGGGSGGGGSDIVMTQSPLSLPVTPGEPASISCRSSQSLLHSVGYNY | |
| | | LDWYLQKPGQSPQLLIYLGSNRASGVPDRFSGSGSGTDFTLKISRVEAEDVGVYYCMQALQTP | |
| | | FTFGPGTKLEIKSGGGGSEVQLVESGGGLVQPGGSLKLSCAASGFTFNKYAMNWVRQAPGKGL | |
| | | EWVARIRSKYNNYATYYADSVKDRFTISRDDSKNTAYLQMNNLKTEDTAVYYCVRHGNFGNSY | |
| | | ISYWAYWGQGTLVTVSSGGGGSGGGGSGGGGSQTVVTQEPSLTVSPGGTVTLTCGSSTGAVTS | |
| | | GNYPNWVQQKPGQAPRGLIGGTKFLAPGTPARFSGSLLGGKAALTLSGVQPEDEAEYYCVLWY | |
| | | SNRWVFGGGTKLTVLGGGGSQRFCTGHFGGLHPCNGGGGGSGGGSRDWDFDVFGGGTPVGGHH | |
| | | HHHH | |
| 408. | CH19_9-F1xI2C6-LH-FcB- | QRFVTGHFGGLHPANGGGGGSQVQLVQSGAEVKEPGASVKVSCKASGYTFTYYGISWVRQAPG | |
| | CH-156 | QGLEWMGWINPYTGNRNYAQKVQDRVTMTTDTSTNTAYMELRSLRSDDTAVYYCARGSGGFDY | |
| | | WGQGTLVTVSSGGGGSGGGGSGGGGSDIVMTQSPLSLPVTPGEPASISCRSSQSLLHSVGYNY | |
| | | LDWYLQKPGQSPQLLIYLGSNRASGVPDRFSGSGSGTDFTLKISRVEAEDVGVYYCMQALQTP | |
| | | FTFGPGTKLEIKSGGGGSEVQLVESGGGLVQPGGSLKLSCAASGFTFNKYAMNWVRQAPGKGL | |
| | | EWVARIRSKYNNYATYYADSVKDRFTISRDDSKNTAYLQMNNLKTEDTAVYYCVRHGNFGNSY | |
| | | ISYWAYWGQGTLVTVSSGGGGSGGGGSGGGGSQTVVTQEPSLTVSPGGTVTLTCGSSTGAVTS | |
| | | GNYPNWVQQKPGQAPRGLIGGTKFLAPGTPARFSGSLLGGKAALTLSGVQPEDEAEYYCVLWY | |
| | | SNRWVFGGGTKLTVLGGGGSQRFCTGHFGGLHPCNGGGGGSGGGSRDWDFDVFGGGTPVGGHH | |
| | | HHHH | |
| 409. | CH19_4-A7xI2C6-LH-FcB- | QRFVTGHFGGLHPANGGGGGSQVQLVQSGAEVKKPGASVKVSCKASGYTFTYYGISWVRQAPG | |
| | CH-156 | QGLEWMGWINPYIGKTNYAQKLQGRVIMITDTSTSTAYMELRSLRSDDTAVYYCARGSGGFDY | |
| | | WGQGILVTVSSGGGGSGGGGSGGGGSDIVMTQSPLSLPVTPGEPASISCRSSQSLLHSVGYNY | |
| | | LDWYLQKPGQSPQLLIYLGSNRASGVPDRFSGSGSGIDFTLKISRVEAEDVGVYYCMQALQTP | |
| | | FTFGPGTKVEIKSGGGGSEVQLVESGGGLVQPGGSLKLSCAASGFTFNKYAMNWVRQAPGKGL | |
| | | EWVARIRSKYNNYATYYADSVKDRFTISRDDSKNTAYLQMNNLKTEDTAVYYCVRHGNFGNSY | |
| | | ISYWAYWGQGTLVTVSSGGGGSGGGGSGGGGSQTVVTQEPSLTVSPGGTVTLTCGSSTGAVTS | |
| | | GNYPNWVQQKPGQAPRGLIGGTKFLAPGTPARFSGSLLGGKAALTLSGVQPEDEAEYYCVLWY | |
| | | SNRWVFGGGTKLTVLGGGGSQRFCTGHFGGLHPCNGGGGGSGGGSRDWDFDVFGGGTPVGGHH | |
| | | HHHH | |
| 410. | CH19_6-E12xI2C6-LH- | QRFVTGHFGGLHPANGGGGGSQVQLVQSGAEVKKPGASVKVSCKASGYTFTSYGITWVRQAPG | |
| | FcB-CH-156 | QGLEWMGWINPYTGNRNYAQKVQGRVTMTTDTSTSTAYMELRSLRSDDTAVYYCARGSGGFDY | |
| | | WGQGTLVTVSSGGGGSGGGGSGGGGSDIVMTQSPLSLSVTPGEPASISCRSSQSLLHSVGYNY | |
| | | LDWYLQKPGQSPQLLIYLGSNRASGVPDRFSGSGSGIDFTLKISRVEAEDVGVYYCMQALQTP | |
| | | FTFGPGTKVDIKSGGGGSEVQLVESGGGLVQPGGSLKLSCAASGFTFNKYAMNWVRQAPGKGL | |
| | | EWVARIRSKYNNYATYYADSVKDRFTISRDDSKNTAYLQMNNLKTEDTAVYYCVRHGNFGNSY | |
| | | ISYWAYWGQGTLVTVSSGGGGSGGGGSGGGGSQTVVTQEPSLTVSPGGTVTLTCGSSTGAVTS | |
| | | GNYPNWVQQKPGQAPRGLIGGTKFLAPGTPARFSGSLLGGKAALTLSGVQPEDEAEYYCVLWY | |
| | | SNRWVFGGGTKLTVLGGGGSQRFCTGHFGGLHPCNGGGGGSGGGSRDWDFDVFGGGTPVGGHH | |
| | | HHHH | |
| 411. | CH19_6-C12xI2C6-LH- | QRFVTGHFGGLHPANGGGGGSQVQLVQSGAEVKKPGASVKVSCKASGYTFTSYGISWVRQAPG | |
| | FcB-CH-156 | QGLEWMGWINPYIGNRNYAQKFQGRVIMITDTSTNTAYMELSSLRSEDTAVYYCARGSGGFDY | |
| | | WGQGILVTVSSGGGGSGGGGSGGGGSDIVMTQSPLSLPVTPGEPASISCRSSQSLLHSVGYNY | |
| | | LDWYLQKPGQSPQLLIYLGSNRASGVPDRFSGSGSGTDFTLKISRVEAEDVGVYYCMQALQTP | |
| | | FTFGPGTKVDIKSGGGGSEVQLVESGGGLVQPGGSLKLSCAASGFTFNKYAMNWVRQAPGKGL | |
| | | EWVARIRSKYNNYATYYADSVKDRFTISRDDSKNTAYLQMNNLKTEDTAVYYCVRHGNFGNSY | |
| | | ISYWAYWGQGTLVTVSSGGGGSGGGGSGGGGSQTVVTQEPSLTVSPGGTVTLTCGSSTGAVTS | |
| | | GNYPNWVQQKPGQAPRGLIGGTKFLAPGTPARFSGSLLGGKAALTLSGVQPEDEAEYYCVLWY | |
| | | SNRWVFGGGTKLTVLGGGGSQRFCTGHFGGLHPCNGGGGGSGGGSRDWDFDVFGGGTPVGGHH | |
| | | HHHH | |
| 412. | CH19_6-A7xI2C6-LH-FcB- | QRFVTGHFGGLHPANGGGGGSQVQLVQSGAEVKKPGASVKVSCKASGYSFTSYGISWVRQAPG | |
| | CH-156 | QGLEWMGWINPYTGNRNYAQKVQGRVTMTTDTSTSTAYMELRSLRSDDTAVYYCARGSGGFDY | |
| | | WGQGTLVTVSSGGGGSGGGGSGGGGSDIVMTQSPLSLPVTPGEPASISCRSSQSLLHSVGYNY | |
| | | LDWYLQKPGQSPQLLIYLGSNRASGVPDRFSGSGSGTDFTLKISRVEAEDVGVYYCMQALQTP | |
| | | FTFGPGTKVEIKSGGGGSEVQLVESGGGLVQPGGSLKLSCAASGFTFNKYAMNWVRQAPGKGL | |
| | | EWVARIRSKYNNYATYYADSVKDRFTISRDDSKNTAYLQMNNLKTEDTAVYYCVRHGNFGNSY | |
| | | ISYWAYWGQGTLVTVSSGGGGSGGGGSGGGGSQTVVTQEPSLTVSPGGTVTLTCGSSTGAVTS | |
| | | GNYPNWVQQKPGQAPRGLIGGTKFLAPGTPARFSGSLLGGKAALTLSGVQPEDEAEYYCVLWY | |
| | | SNRWVFGGGTKLTVLGGGGSQRFCTGHFGGLHPCNGGGGGSGGGSRDWDFDVFGGGTPVGGHH | |
| | | HHHH | |
| 413. | CH19_6-G8xI2C6-LH-FcB- | QRFVTGHFGGLHPANGGGGGSQVQLVQSGAEVKKPGASVKVSCKASGYTFTYYGISWVRQAPG | |
| | CH-156 | QGLEWMGWINPYIGKTNYAQKVQGRVIMITDTSTSTAYMELRNLRSDDTAVYYCARGSGGFDY | |
| | | WGQGTLVTVSSGGGGSGGGGSGGGGSDIVMTQTPLSLSVTPGQPASISCRSSQSLLHSVGYNY | |
| | | LDWYLQKPGQSPQLLTYLGSNRASGVPDRFSGSGSGIDFTLKISRVEAEDVGVYYCMQALQTP | |
| | | FTFGPGTKVDIKSGGGGSEVQLVESGGGLVQPGGSLKLSCAASGFTFNKYAMNWVRQAPGKGL | |
| | | EWVARIRSKYNNYATYYADSVKDRFTISRDDSKNTAYLQMNNLKTEDTAVYYCVRHGNFGNSY | |
| | | ISYWAYWGQGTLVTVSSGGGGSGGGGSGGGGSQTVVIQEPSLIVSPGGIVTLICGSSTGAVIS | |
| | | GNYPNWVQQKPGQAPRGLIGGTKFLAPGTPARFSGSLLGGKAALTLSGVQPEDEAEYYCVLWY | |
| | | SNRWVFGGGTKLTVLGGGGSQRFCTGHFGGLHPCNGGGGGSGGGSRDWDFDVFGGGTPVGGHH | |
| | | HHHH | |
| 414. | CH19_6-F9xI2C6-LH-FcB- | QRFVTGHFGGLHPANGGGGGSQVQLVQSGAEVKKPGASVKVSCKASGYTFTYYGISWVRQAPG | |
| | CH-156 | QGLEWMGWINPYTGKTNYAQKLQGRVTMTTDTSTSTAYMELRSLRSDDTAVYYCARGSGGFDY | |
| | | WGQGTLVTVSSGGGGSGGGGSGGGGSDIVMTQTPLSLSVTPGQPASISCRSSQSLLHSVGYNY | |
| | | LDWYLQKPGQSPQLLTYLGSNRASGVPDRFSGSGSGTDFTLKISRVEAEDVGVYYCMQALQTP | |
| | | FTFGPGTKVDIKSGGGGSEVQLVESGGGLVQPGGSLKLSCAASGFTFNKYAMNWVRQAPGKGL | |
| | | EWVARIRSKYNNYATYYADSVKDRFTISRDDSKNTAYLQMNNLKTEDTAVYYCVRHGNFGNSY | |
| | | ISYWAYWGQGTLVTVSSGGGGSGGGGSGGGGSQTVVTQEPSLTVSPGGTVTLTCGSSTGAVTS | |
| | | GNYPNWVQQKPGQAPRGLIGGTKFLAPGTPARFSGSLLGGKAALTLSGVQPEDEAEYYCVLWY | |
| | | SNRWVFGGGTKLTVLGGGGSQRFCTGHFGGLHPCNGGGGGSGGGSRDWDFDVFGGGTPVGGHH | |
| | | HHHH | |
| 415. | CH19_0-C11xI2C6-LH- | QRFVTGHFGGLHPANGGGGGSQVQLVESGGGVVQPGRSLRLSCAASGFTFRNYAMHWVRQAPG | |
| | FcB-CH-156 | KGLEWVAVISYSGNNKYYASSVKGRFTISRDNSKNTLYLQLNSLRAEDTAVYYCAREFYYDST | |
| | | GYDYSTPGDYWGQGTLVTVSSGGGGSGGGGSGGGGSDIQMTQSPSSLSASVGDRVTITCQASQ | |
| | | DISNYLNWYQQKPGKAPKLLIYDASNLEIGVPSRFSGSGSGTDFIFTISSLQPEDIATYYCQQ | |
| | | YDNLPTFGQGTRLEIKSGGGGSEVQLVESGGGLVQPGGSLKLSCAASGFTFNKYAMNWVRQAP | |
| | | GKGLEWVARIRSKYNNYATYYADSVKDRFTISRDDSKNTAYLQMNNLKTEDTAVYYCVRHGNF | |
| | | GNSYISYWAYWGQGTLVTVSSGGGGSGGGGSGGGGSQTVVTQEPSLIVSPGGIVTLICGSSIG | |
| | | AVISGNYPNWVQQKPGQAPRGLIGGTKFLAPGTPARFSGSLLGGKAALTLSGVQPEDEAEYYC | |
| | | VLWYSNRWVEGGGIKLTVLGGGGSQRFCIGHFGGLHPCNGGGGGSGGGSRDWDFDVFGGGIPV | |
| | | GGHHHHHH | |
| 416. | CH19_8-F6xI2C6-LH-FcB- | QRFVTGHFGGLHPANGGGGGSQVQLVESGGGVVQPGRSLRLSCVASGFTFRNYAMHWVRQAPG | |
| | CH-156 | KGLEWVAVISYSGNNKYYASSVKGRFTISRDNSKNTLYLQLNSLRAEDTAVYYCAREFYYDST | |
| | | GYDYSTPGDYWGQGTLVIVSSGGGGSGGGGSGGGGSDIQMTQSPSSLSASVGDRVTITCRASQ | |
| | | SISSYLNWYQQKPGKAPKLLIYDASSLQSGVPSRFSGSGSGTEFTLTISSLQAEDVAVYYCQQ | |
| | | YYSTPLTFGGGTKVDIKSGGGGSEVQLVESGGGLVQPGGSLKLSCAASGFTFNKYAMNWVRQA | |
| | | PGKGLEWVARIRSKYNNYATYYADSVKDRFTISRDDSKNTAYLQMNNLKTEDTAVYYCVRHGN | |
| | | FGNSYISYWAYWGQGTLVTVSSGGGGSGGGGSGGGGSQTVVTQEPSLTVSPGGTVTLTCGSST | |
| | | GAVTSGNYPNWVQQKPGQAPRGLIGGTKFLAPGTPARFSGSLLGGKAALTLSGVQPEDEAEYY | |
| | | CVLWYSNRWVFGGGIKLIVLGGGGSQRFCTGHFGGLHPCNGGGGGSGGGSRDWDFDVFGGGIP | |
| | | VGGHHHHHH | |
| 417. | CH19_0-G9xI2C6-LH-FcB- | QRFVTGHFGGLHPANGGGGGSQVQLVESGGGVVQPGRSLRLSCAASGFTFRNYAMHWVRQAPG | |
| | CH-156 | KGLEWVAGISYSGTNKYYASSVKGRFTISRDNSKNTLYLQLNSLRAEDTAVYYCAREFYYDST | |
| | | GYDYSTPGDYWGQGTLVTVSSGGGGSGGGGSGGGGSDIQMTQSPSSLSASVGDRVTITCQASQ | |
| | | DISNYLNWYQQKPGKAPKLLIYDASNLETGVPSRFSGSGSGTEFILTISSLQPEDIATYYCQQ | |
| | | YDNLPLTFGGGTKVDIKSGGGGSEVQLVESGGGLVQPGGSLKLSCAASGFTFNKYAMNWVRQA | |
| | | PGKGLEWVARIRSKYNNYATYYADSVKDRFTISRDDSKNTAYLQMNNLKTEDTAVYYCVRHGN | |
| | | FGNSYISYWAYWGQGTLVTVSSGGGGSGGGGSGGGGSQTVVTQEPSLTVSPGGTVTLTCGSST | |
| | | GAVTSGNYPNWVQQKPGQAPRGLIGGTKFLAPGTPARFSGSLLGGKAALTLSGVQPEDEAEYY | |
| | | CVLWYSNRWVFGGGIKLIVLGGGGSQRFCTGHFGGLHPCNGGGGGSGGGSRDWDFDVFGGGTP | |
| | | VGGHHHHHH | |
| 418. | CH19_1-E11xI2C6-LH- | QRFVTGHFGGLHPANGGGGGSQVQLVESGGGVVQPGRSLRLSCVASGFTFRNYAMHWVRQAPG | |
| | FcB-CH-156 | KGLEWVAVISYSGNNKYYASSVKGRFTISRDNSKNTLFLQLNSLRAEDTAVYYCAREFYYDST | |
| | | GYDYSTPGNYWGQGTLVTVSSGGGGSGGGGSGGGGSDIQMTQSPSSLSASVGDRVTITCQASQ | |
| | | DISNYLNWYQQKPGKAPKLLIYDASNLETGVPSRFSGSGSGTDFIFTISSLQPEDIATYYCQQ | |
| | | YVNLPLTFGGGTKLEIKSGGGGSEVQLVESGGGLVQPGGSLKLSCAASGFTFNKYAMNWVRQA | |
| | | PGKGLEWVARIRSKYNNYATYYADSVKDRFTISRDDSKNTAYLQMNNLKTEDTAVYYCVRHGN | |
| | | FGNSYISYWAYWGQGTLVIVSSGGGGSGGGGSGGGGSQTVVIQEPSLIVSPGGIVTLICGSST | |
| | | GAVTSGNYPNWVQQKPGQAPRGLIGGTKFLAPGTPARFSGSLLGGKAALTLSGVQPEDEAEYY | |
| | | CVLWYSNRWVFGGGIKLIVLGGGGSQRFCTGHFGGLHPCNGGGGGSGGGSRDWDFDVFGGGIP | |
| | | VGGHHHHHH | |
| 419. | CH19_0-F5xI2C6-LH-FcB- | QRFVTGHFGGLHPANGGGGGSQVQLVESGGGVVQPGRSLRLSCAASGFTFSSYGMQWVRQAPG | |
| | CH-156 | KGLEWVAVIWYSGSNKYYASSVKGRFTISRDNSKNTLYLQMNSLRAEDTAVYYCARDGYPIFY | |
| | | RYYGMDVWGQGTIVIVSSGGGGSGGGGSGGGGSDIQMTQSPSSLSASVGDRVTITCRASQGIS | |
| | | NYLAWYQQKPGKVPKLLIYAASTLQSGVPSRFSGSGSGTDFILTISSLQPEDVATYYCQKYNS | |
| | | APLTFGGGTKVEIKSGGGGSEVQLVESGGGLVQPGGSLKLSCAASGFTFNKYAMNWVRQAPGK | |
| | | GLEWVARIRSKYNNYATYYADSVKDRFTISRDDSKNTAYLQMNNLKTEDTAVYYCVRHGNFGN | |
| | | SYISYWAYWGQGTLVTVSSGGGGSGGGGSGGGGSQTVVTQEPSLTVSPGGTVTLTCGSSTGAV | |
| | | TSGNYPNWVQQKPGQAPRGLIGGTKFLAPGTPARFSGSLLGGKAALTLSGVQPEDEAEYYCVL | |
| | | WYSNRWVFGGGTKLTVLGGGGSQRFCTGHFGGLHPCNGGGGGSGGGSRDWDFDVFGGGTPVGG | |
| | | HHHHHH | |
| 420. | CH19_1-E1xI2C6-LH-FcB- | QRFVTGHFGGLHPANGGGGGSQVQLVESGGGVVQPGRSLRLSCAASGFTFSSYGMHWVRQAPG | |
| | CH-156 | KGLEWVAVISYSGSNKYYASSVKGRFTISRDNSKNTLYLQMNSLRAEDTAVYYCARDGYPIFY | |
| | | RYYGMDVWGQGTIVIVSSGGGGSGGGGSGGGGSEIVLIQSPGILSLSPGERAILSCRASQSVS | |
| | | SSYLAWYQQKPGQAPRLLIYGASSRATGIPDRFSGSGSGTDFTLIISRLEPEDLAVYYCQQYG | |
| | | TSPLTFGGGTKLEIKSGGGGSEVQLVESGGGLVQPGGSLKLSCAASGFTFNKYAMNWVRQAPG | |
| | | KGLEWVARIRSKYNNYATYYADSVKDRFTISRDDSKNTAYLQMNNLKTEDTAVYYCVRHGNFG | |
| | | NSYISYWAYWGQGTLVTVSSGGGGSGGGGSGGGGSQTVVTQEPSLTVSPGGTVTLTCGSSTGA | |
| | | VTSGNYPNWVQQKPGQAPRGLIGGTKFLAPGTPARFSGSLLGGKAALTLSGVQPEDEAEYYCV | |
| | | LWYSNRWVFGGGTKLTVLGGGGSQRFCTGHFGGLHPCNGGGGGSGGGSRDWDFDVFGGGTPVG | |
| | | GHHHHHH | |
| 421. | CH19_1-E6xI2C6-LH-FcB- | QRFVTGHFGGLHPANGGGGGSQVQLVESGGGVVQPGRSLRLSCAASGFTFSSFGMHWVRQAPG | |
| | CH-156 | KGLEWVAFIWYSGSNKYYASSVKGRVTISRDNSKNTLYLQMNSLRAEDTAVYYCARDGYPIFY | |
| | | YYYGMDVWGQGTTVTVSSGGGGSGGGGSGGGGSEIVLTQSPGTLSLSPGERATLSCRASQSVS | |
| | | SSYLAWYQQKPGQAPRLLIYGASSRATGIPDRFSGSGSGTDFTLIISRLEPEDFAVYYCQQYG | |
| | | SSPFTFGPGTRLEIKSGGGGSEVQLVESGGGLVQPGGSLKLSCAASGFTFNKYAMNWVRQAPG | |
| | | KGLEWVARIRSKYNNYATYYADSVKDRFTISRDDSKNTAYLQMNNLKTEDTAVYYCVRHGNFG | |
| | | NSYISYWAYWGQGTLVTVSSGGGGSGGGGSGGGGSQTVVTQEPSLTVSPGGTVTLTCGSSTGA | |
| | | VTSGNYPNWVQQKPGQAPRGLIGGTKFLAPGTPARFSGSLLGGKAALTLSGVQPEDEAEYYCV | |
| | | LWYSNRWVEGGGIKLTVLGGGGSQRFCTGHFGGLHPCNGGGGGSGGGSRDWDFDVFGGGTPVG | |
| | | GHHHHHH | |
| 422. | CH19_2G6_302_VKGxI2C6- | QRFVTGHFGGLHPANGGGGGSQVQLVESGGGVVQPGGSLRLSCAASGFTFSSYGMHWVRQAPG | |
| | LH-FcB-LH-156 | KGLEWVAFIWYDGSNKYYADSVKGRFTISRDNSKNTLYLQMNSLRAEDTAVYYCARRAGIIGT | |
| | | IGYYYGMDVWGQGTTVTVSSGGGGSGGGGSGGGGSSYELTQPPSVSVSPGQTASITCSGDRLG | |
| | | EKYTSWYQQRPGQSPLLVIYQDTKRPSGIPERFSGSNSGNTATLIISGTQAMDEADYYCQAWE | |
| | | SSTVVFGGGTKLIVLSGGGGSEVQLVESGGGLVQPGGSLKLSCAASGFTENKYAMNWVRQAPG | |
| | | KGLEWVARIRSKYNNYATYYADSVKDRFTISRDDSKNTAYLQMNNLKTEDTAVYYCVRHGNFG | |
| | | NSYISYWAYWGQGTLVTVSSGGGGSGGGGSGGGGSQTVVTQEPSLTVSPGGTVTLTCGSSTGA | |
| | | VTSGNYPNWVQQKPGQAPRGLIGGTKFLAPGTPARFSGSLLGGKAALTLSGVQPEDEAEYYCV | |
| | | LWYSNRWVFGGGTKLTVLGGGGSQRFVTGHFGGLHPANGGGGGSGGGSRDWDFDVFGGGTPVG | |
| | | GHHHHHH | |
| 423. | CH19_0-E11xI2C6-LH- | QRFVTGHFGGLHPANGGGGGSQVQLQESGPGLVKPSQTLSLTCTVSGGSISRGGYYWSWIRQH | |
| | FcB-LH-156 | PGKGLEWIGYIFYRGRTYYNPSLKSRVTISVDTSKNQFSLKLSSVTAADTAVYYCARVNSNYG | |
| | | WFDPWGQGTLVTVSSGGGGSGGGGSGGGGSEIVLTQFPGILSLSPGERATLSCRASQSVSSSY | |
| | | LAWYQQKPGQAPRLLIYGASSRATGIPDRFSGSGSGTDFTLTISRLEPEDFAVYYCQQYGSSP | |
| | | LTFGGGTKLEIKSGGGGSEVQLVESGGGLVQPGGSLKLSCAASGFTFNKYAMNWVRQAPGKGL | |
| | | EWVARIRSKYNNYATYYADSVKDRFTISRDDSKNTAYLQMNNLKTEDTAVYYCVRHGNFGNSY | |
| | | ISYWAYWGQGTLVTVSSGGGGSGGGGSGGGGSQTVVTQEPSLTVSPGGTVTLTCGSSTGAVTS | |
| | | GNYPNWVQQKPGQAPRGLIGGTKFLAPGTPARFSGSLLGGKAALTLSGVQPEDEAEYYCVLWY | |
| | | SNRWVFGGGTKLIVLGGGGSQRFVTGHFGGLHPANGGGGGSGGGSRDWDFDVFGGGTPVGGHH | |
| | | HHHH | |
| 424. | CH19_5-G4xI2C6-LH-FcB- | QRFVTGHFGGLHPANGGGGGSQVQLQESGPGLVKPSQTLSLTCTVSGGSISSGGYYWSWIRQH | |
| | LH-156 | PGKGLEWIGYIFYRGRTYYNPSLKSRVTISVDTSKNQFSLKLSSVTAADTAVYYCARVYSNYG | |
| | | WFDPWGQGTLVTVSSGGGGSGGGGSGGGGSEIVLIQSPGILSLSPGERATLSCRASQSVSSSY | |
| | | LAWYQQKPGQAPRLLIYGTSNRATGIPDRFSGSGSGTDFTLTISRLEPEDFAVYYCQQYGSSP | |
| | | LTFGGGTKLEIKSGGGGSEVQLVESGGGLVQPGGSLKLSCAASGFTFNKYAMNWVRQAPGKGL | |
| | | EWVARIRSKYNNYATYYADSVKDRFTISRDDSKNTAYLQMNNLKTEDTAVYYCVRHGNFGNSY | |
| | | ISYWAYWGQGTLVTVSSGGGGSGGGGSGGGGSQTVVTQEPSLTVSPGGTVTLTCGSSTGAVTS | |
| | | GNYPNWVQQKPGQAPRGLIGGTKFLAPGTPARFSGSLLGGKAALTLSGVQPEDEAEYYCVLWY | |
| | | SNRWVFGGGTKLTVLGGGGSQRFVTGHFGGLHPANGGGGGSGGGSRDWDFDVFGGGTPVGGHH | |
| | | HHHH | |
| 425. | CH19_8-H6xI2C6-LH-FcB- | QRFVTGHFGGLHPANGGGGGSQVQLQESGPGLVKPSQTLSLICTVSGGSISSGGYYWSWIRQH | |
| | LH-156 | PGKGLEWIGYIFYSGRTYYNPSLKSRVTISVDTSKNQFSLKLSSVTAADTAVYYCARVYSNYG | |
| | | WFDPWGQGTLVTVSSGGGGSGGGGSGGGGSEIVLIQSPGILSLSPGERATLSCRASQSVSSSY | |
| | | LAWYQQKPGQAPRLLIYGASSRATGIPDRFSGSGSGTDFTLTISRLEPEDFAVYYCQQYGSSP | |
| | | LTFGGGTKLEIKSGGGGSEVQLVESGGGLVQPGGSLKLSCAASGFTFNKYAMNWVRQAPGKGL | |
| | | EWVARIRSKYNNYATYYADSVKDRFTISRDDSKNTAYLQMNNLKTEDTAVYYCVRHGNFGNSY | |
| | | ISYWAYWGQGTLVTVSSGGGGSGGGGSGGGGSQTVVIQEPSLIVSPGGIVTLICGSSTGAVIS | |
| | | GNYPNWVQQKPGQAPRGLIGGTKFLAPGTPARFSGSLLGGKAALTLSGVQPEDEAEYYCVLWY | |
| | | SNRWVFGGGTKLTVLGGGGSQRFVTGHFGGLHPANGGGGGSGGGSRDWDFDVFGGGTPVGGHH | |
| | | HHHH | |
| 426. | CH19_2-C11xI2C6-LH- | QRFVTGHFGGLHPANGGGGGSQVQLQESGPGLVKPSQTLSLTCTVSGGSISSGGYYWSWIRQH | |
| | FcB-LH-156 | PGKGLEWIGYIFYSGRTYYNPSLKSRVTISVDTSKNQFSLKLRSVTAADTAVYYCARVYSNYG | |
| | | WFDPWGQGTLVTVSSGGGGSGGGGSGGGGSEIVLIQSPGILSLSPGERATLSCRASQSVSSSY | |
| | | LAWYQQKPGQAPRLLIYGASSRATGIPDRFSGSGSGIDFILTISRLEPEDFAVYYCQQYGSSP | |
| | | LTFGGGTKLEIKSGGGGSEVQLVESGGGLVQPGGSLKLSCAASGFTFNKYAMNWVRQAPGKGL | |
| | | EWVARIRSKYNNYATYYADSVKDRFTISRDDSKNTAYLQMNNLKTEDTAVYYCVRHGNFGNSY | |
| | | ISYWAYWGQGTLVTVSSGGGGSGGGGSGGGGSQTVVTQEPSLTVSPGGTVTLTCGSSTGAVTS | |
| | | GNYPNWVQQKPGQAPRGLIGGTKFLAPGTPARFSGSLLGGKAALTLSGVQPEDEAEYYCVLWY | |
| | | SNRWVFGGGTKLIVLGGGGSQRFVTGHFGGLHPANGGGGGSGGGSRDWDFDVFGGGTPVGGHH | |
| | | HHHH | |
| 427. | CH19_2-A10xI2C6-LH- | QRFVTGHFGGLHPANGGGGGSQVQLQESGPGLVKPSQTLSLTCTVSGGSISSGGYYWSWIRQH | |
| | FcB-LH-156 | PGKGLEWIGYIYYSGSTFYNPSLRSRVTISVDTSKNQFSLKLSSVTAADTAVYYCARDSSSSR | |
| | | ALDYWGQGTLVTVSSGGGGSGGGGSGGGGSEIVLIQSPGILSLSPGERATLSCRASQSVSSSY | |
| | | LAWYQQKPGQAPRLLIYGASSRATGIPDRFSGSGSGTDFTLTISRLEPEDFAVYYCQQYDSSP | |
| | | RTFGQGTKLEIKSGGGGSEVQLVESGGGLVQPGGSLKLSCAASGFTFNKYAMNWVRQAPGKGL | |
| | | EWVARIRSKYNNYATYYADSVKDRFTISRDDSKNTAYLQMNNLKTEDTAVYYCVRHGNFGNSY | |
| | | ISYWAYWGQGTLVTVSSGGGGSGGGGSGGGGSQTVVTQEPSLTVSPGGTVTLTCGSSTGAVTS | |
| | | GNYPNWVQQKPGQAPRGLIGGTKFLAPGTPARFSGSLLGGKAALTLSGVQPEDEAEYYCVLWY | |
| | | SNRWVFGGGTKLTVLGGGGSQRFVTGHFGGLHPANGGGGGSGGGSRDWDFDVFGGGTPVGGHH | |
| | | HHHH | |
| 428. | CH19_1-D11xI2C6-LH- | QRFVTGHFGGLHPANGGGGGSQVQLQESGPGLVKPSQTLSLTCTVSGGSISSGGYYWSWIRQH | |
| | FcB-LH-156 | PGKGLEWIGYIYYRGRTYYNPSLKSRVTISVDTSKNQFSLKLSSVTAADTAVYYCARVYSNYG | |
| | | WFDPWGQGTLVTVSSGGGGSGGGGSGGGGSEIVLIQSPGILSLSPGERATLSCRASQSVSSSY | |
| | | LAWYQQKPGQAPRLLIYGASSRATGIPDRFSGSGSGTDFTLTISRLEPEDFAVYYCQQYGSSP | |
| | | LTFGGGTKLEIKSGGGGSEVQLVESGGGLVQPGGSLKLSCAASGFTFNKYAMNWVRQAPGKGL | |
| | | EWVARIRSKYNNYATYYADSVKDRFTISRDDSKNTAYLQMNNLKTEDTAVYYCVRHGNFGNSY | |
| | | ISYWAYWGQGTLVTVSSGGGGSGGGGSGGGGSQTVVTQEPSLTVSPGGTVTLTCGSSTGAVTS | |
| | | GNYPNWVQQKPGQAPRGLIGGTKFLAPGTPARFSGSLLGGKAALTLSGVQPEDEAEYYCVLWY | |
| | | SNRWVFGGGTKLTVLGGGGSQRFVTGHFGGLHPANGGGGGSGGGSRDWDFDVFGGGTPVGGHH | |
| | | HHHH | |
| 429. | CH19_9-F9xI2C6-LH-FcB- | QRFVIGHFGGLHPANGGGGGSQVQLQESGPGLVKPSETLSLICTVSGGSISSGGYYWSWIRQH | |
| | LH-156 | PGKGLEWIGYIFYRGRTYYNPSLKSRVTISVDTSKNQFSLKLSSVTAADTAVYYCARVYSNYG | |
| | | WFDPWGQGTLVTVSSGGGGSGGGGSGGGGSEIVLIQSPGILSLSPGERATLSCRASQSVSSSY | |
| | | LAWYQQKPGQAPRLLIYGASSRATGIPDRFSGSGSGTDFTLTISRLEPEDFAVYYCQQYGSSP | |
| | | TFGGGTKVEIKSGGGGSEVQLVESGGGLVQPGGSLKLSCAASGFTFNKYAMNWVRQAPGKGLE | |
| | | WVARIRSKYNNYATYYADSVKDRFTISRDDSKNTAYLQMNNLKTEDTAVYYCVRHGNFGNSYI | |
| | | SYWAYWGQGTLVTVSSGGGGSGGGGSGGGGSQTVVTQEPSLTVSPGGTVTLTCGSSTGAVTSG | |
| | | NYPNWVQQKPGQAPRGLIGGTKFLAPGTPARFSGSLLGGKAALTLSGVQPEDEAEYYCVLWYS | |
| | | NRWVFGGGTKLTVLGGGGSQRFVTGHFGGLHPANGGGGGSGGGSRDWDFDVFGGGTPVGGHHH | |
| | | HHH | |
| 430. | CH19_1-H8xI2C6-LH-FcB- | QRFVTGHFGGLHPANGGGGGSQVQLQESGPGLVKPSQTLSLTCTVSGGSISSGGYYWSWIRQH | |
| | LH-156 | PGKGLEWIGYIFYRGRTYYNPSLKSRVTISVDTSKNQFSLKLSSVTAADTAVYYCARVYSNYG | |
| | | WFDPWGQGTLVTVSSGGGGSGGGGSGGGGSEIVLIQSPGILSLSPGERATLSCRASQSVSSSY | |
| | | LAWYQQKPGQAPRLLIYGASSRATGIPDRFSGSGSGIDFTLTISRLEPEDFAVYYCQQYGSSP | |
| | | LTFGGGTKVEIKSGGGGSEVQLVESGGGLVQPGGSLKLSCAASGFTFNKYAMNWVRQAPGKGL | |
| | | EWVARIRSKYNNYATYYADSVKDRFTISRDDSKNTAYLQMNNLKTEDTAVYYCVRHGNFGNSY | |
| | | ISYWAYWGQGTLVTVSSGGGGSGGGGSGGGGSQTVVTQEPSLTVSPGGTVTLTCGSSTGAVTS | |
| | | GNYPNWVQQKPGQAPRGLIGGTKFLAPGTPARFSGSLLGGKAALTLSGVQPEDEAEYYCVLWY | |
| | | SNRWVFGGGTKLTVLGGGGSQRFVTGHFGGLHPANGGGGGSGGGSRDWDFDVFGGGTPVGGHH | |
| | | HHHH | |
| 431. | CH19_1-B12xI2C6-LH- | QRFVTGHFGGLHPANGGGGGSQVQLQESGPGLVKPSQTLSLTCTVSGGSISSGGYYWSWIRQH | |
| | FcB-LH-156 | PGKGLEWIGYIYYRGRTYYNPSLKSRVTISVDTSKNQFSLKLSSVTAADTAVYYCARVYSNYG | |
| | | WFDPWGQGTLVTVSSGGGGSGGGGSGGGGSEIVLIQSPGILSLSPGERATLSCRASQSVSSSY | |
| | | LAWYQQKPGQAPRLLIYGASSRATGIPDRFSGSGSGTDFTLTISRLEPEDFAVYYCQQYGSSP | |
| | | TFGPGTKVEIKSGGGGSEVQLVESGGGLVQPGGSLKLSCAASGFTFNKYAMNWVRQAPGKGLE | |
| | | WVARIRSKYNNYATYYADSVKDRFTISRDDSKNTAYLQMNNLKTEDTAVYYCVRHGNFGNSYI | |
| | | SYWAYWGQGTLVTVSSGGGGSGGGGSGGGGSQTVVTQEPSLIVSPGGIVTLICGSSTGAVISG | |
| | | NYPNWVQQKPGQAPRGLIGGTKFLAPGTPARFSGSLLGGKAALTLSGVQPEDEAEYYCVLWYS | |
| | | NRWVFGGGTKLTVLGGGGSQRFVTGHFGGLHPANGGGGGSGGGSRDWDFDVFGGGTPVGGHHH | |
| | | HHH | |
| 432. | CH19_0-C4xI2C6-LH-FcB- | QRFVTGHFGGLHPANGGGGGSQVQLQESGPGLVKPSQTLSLTCTVSGGSISSGGYYWSWIRQH | |
| | LH-156 | PGKGLEWIGYIYYRGRTYYNPSLKSRVTISVDTSKNQFSLKLSSVTAADTAVYYCARVYSNYG | |
| | | WFDPWGQGTLVTVSSGGGGSGGGGSGGGGSEIVLIQSPGILSLSPGERATLSCRASQSVSSSY | |
| | | LAWYQQKPGQAPRLLIYGASSRATGIPDRFSGSGSGTDFTLTISRLEPEDFAVYYCQQYGSSP | |
| | | TFGGGTKVEIKSGGGGSEVQLVESGGGLVQPGGSLKLSCAASGFIFNKYAMNWVRQAPGKGLE | |
| | | WVARIRSKYNNYATYYADSVKDRFTISRDDSKNTAYLQMNNLKTEDTAVYYCVRHGNFGNSYI | |
| | | SYWAYWGQGTLVTVSSGGGGSGGGGSGGGGSQTVVTQEPSLTVSPGGTVTLTCGSSTGAVTSG | |
| | | NYPNWVQQKPGQAPRGLIGGIKFLAPGTPARFSGSLLGGKAALTLSGVQPEDEAEYYCVLWYS | |
| | | NRWVFGGGTKLTVLGGGGSQRFVTGHFGGLHPANGGGGGSGGGSRDWDFDVFGGGTPVGGHHH | |
| | | HHH | |
| 433. | CH19_3-F2xI2C6-LH-FcB- | QRFVTGHFGGLHPANGGGGGSQVQLQESGPGLVKPSQTLSLTCTISGGSISSGGYYWSWIRQH | |
| | LH-156 | PGKGLEWIGYIFYSGRTYYNPSLKSRVTISVDTSKNQFSLKLTSVTAADTAVYYCARVNSNYG | |
| | | WFDPWGQGTLVTVSSGGGGSGGGGSGGGGSEIVLIQSPGILSLSPGERATLSCRASQSVSSSY | |
| | | LAWYQQKPGQAPRLLIYGASSRATGIPDRFSGSGSGTDFTLTISRLEPEDFAVYYCQQYGSSP | |
| | | TFGGGTKVEIKSGGGGSEVQLVESGGGLVQPGGSLKLSCAASGFIFNKYAMNWVRQAPGKGLE | |
| | | WVARIRSKYNNYATYYADSVKDRFTISRDDSKNTAYLQMNNLKTEDTAVYYCVRHGNFGNSYI | |
| | | SYWAYWGQGTLVTVSSGGGGSGGGGSGGGGSQTVVTQEPSLTVSPGGTVTLTCGSSTGAVTSG | |
| | | NYPNWVQQKPGQAPRGLIGGTKFLAPGTPARFSGSLLGGKAALTLSGVQPEDEAEYYCVLWYS | |
| | | NRWVFGGGTKLTVLGGGGSQRFVTGHFGGLHPANGGGGGSGGGSRDWDFDVFGGGTPVGGHHH | |
| | | HHH | |
| 434. | CH19_3-B10xI2C6-LH- | QRFVTGHFGGLHPANGGGGGSQVQLQESGPGLVKPSQTLSLICTVSGGSISSGGYYWSWIRQH | |
| | FcB-LH-156 | PGKGLDWIGYIFYRGRTYYNPSLKSRVTISVDTSKNQFSLKLSSVTAADTAVYYCARVNSNYG | |
| | | WFDPWGQGTLVTVSSGGGGSGGGGSGGGGSEIVLIQSPGILSLSPGERATLSCRASQSVSSSY | |
| | | LAWYQQKPGQAPRLLIYGASSRATGIPDRFSGSGSGTDFTLTISRLEPEDFAVYYCQQYGSSP | |
| | | LTFGGGTKVEIKSGGGGSEVQLVESGGGLVQPGGSLKLSCAASGFTFNKYAMNWVRQAPGKGL | |
| | | EWVARIRSKYNNYATYYADSVKDRFTISRDDSKNTAYLQMNNLKTEDTAVYYCVRHGNFGNSY | |
| | | ISYWAYWGQGTLVTVSSGGGGSGGGGSGGGGSQTVVTQEPSLTVSPGGTVTLICGSSTGAVIS | |
| | | GNYPNWVQQKPGQAPRGLIGGTKFLAPGTPARFSGSLLGGKAALTLSGVQPEDEAEYYCVLWY | |
| | | SNRWVFGGGTKLTVLGGGGSQRFVTGHFGGLHPANGGGGGSGGGSRDWDFDVFGGGTPVGGHH | |
| | | HHHH | |
| 435. | CH19_0-G4xI2C6-LH-FcB- | QRFVTGHFGGLHPANGGGGGSQVQLQESGPGLVKPSQTLSLTCTVSGGSISSGGYYWSWIRQH | |
| | LH-156 | PGKGLEWIGYIYYRGRTYYNPSLKSRVTISVDTSKNQFSLKLSSVTAADTAVYYCARVYSNYG | |
| | | WFDPWGQGTLVTVSSGGGGSGGGGSGGGGSEIVLIQSPGILSLSPGERATLSCRASQSVSSSY | |
| | | LAWYQQKPGQAPRLLIYGASTRATGIPDRFSGSGSGIDFILTISRLEPEDFAVYYCQQYGSSP | |
| | | SFGQGTKVEIKSGGGGSEVQLVESGGGLVQPGGSLKLSCAASGFTFNKYAMNWVRQAPGKGLE | |
| | | WVARIRSKYNNYATYYADSVKDRFTISRDDSKNTAYLQMNNLKTEDTAVYYCVRHGNFGNSYI | |
| | | SYWAYWGQGTLVIVSSGGGGSGGGGSGGGGSQTVVTQEPSLIVSPGGIVTLICGSSTGAVISG | |
| | | NYPNWVQQKPGQAPRGLIGGIKFLAPGTPARFSGSLLGGKAALTLSGVQPEDEAEYYCVLWYS | |
| | | NRWVFGGGTKLTVLGGGGSQRFVTGHFGGLHPANGGGGGSGGGSRDWDFDVFGGGTPVGGHHH | |
| | | HHH | |
| 436. | CH19_0-H5xI2C6-LH-FcB- | QRFVTGHFGGLHPANGGGGGSQVQLQESGPGLVRPSQTLSLTCTVSGGSISSGGYYWSWIRQH | |
| | LH-156 | PGKGLEWIGYIYYRGRTYYNPSLKSRVTISVDTSKNQFSLKLSSVTAADTAVYYCARVYSNYG | |
| | | WFDPWGQGTLVTVSSGGGGSGGGGSGGGGSEIVLTQSPGTLSLSPGERATLSCRASQSVSSSY | |
| | | LAWYQQKPGQAPRLLIYGASSRATGIPDRFSGSGSGTDFTLTISRLEPEDFAVYYCQQYDTSP | |
| | | LTFGGGTKVEIKSGGGGSEVQLVESGGGLVQPGGSLKLSCAASGFTFNKYAMNWVRQAPGKGL | |
| | | EWVARIRSKYNNYATYYADSVKDRFTISRDDSKNTAYLQMNNLKTEDTAVYYCVRHGNFGNSY | |
| | | ISYWAYWGQGTLVTVSSGGGGSGGGGSGGGGSQTVVTQEPSLTVSPGGTVTLTCGSSTGAVTS | |
| | | GNYPNWVQQKPGQAPRGLIGGTKFLAPGTPARFSGSLLGGKAALTLSGVQPEDEAEYYCVLWY | |
| | | SNRWVFGGGTKLTVLGGGGSQRFVTGHFGGLHPANGGGGGSGGGSRDWDFDVFGGGTPVGGHH | |
| | | HHHH | |
| 437. | CH19_0-B8xI2C6-LH-FcB- | QRFVTGHFGGLHPANGGGGGSQVQLQESGPGLVKPSQTLSLTCTVSGGSISSGGYYWSWIRQH | |
| | LH-156 | PGKGLEWIGYIYYRGRTYYNPSLKSRVTISVDTSKNQFSLKLSSVTAADTAVYYCARVYSNYG | |
| | | WFDPWGQGTLVTVSSGGGGSGGGGSGGGGSEIVLTQSPGTLSLSPGERATLSCRASQSVSSSY | |
| | | LAWYQQKPGQAPRLLIYGASSRATGIPDRFSGSGSGTDFTLTISRLEPEDFAVYYCQQYGSSP | |
| | | TFGGGTKVEIKSGGGGSEVQLVESGGGLVQPGGSLKLSCAASGFTFNKYAMNWVRQAPGKGLE | |
| | | WVARIRSKYNNYATYYADSVKDRFTISRDDSKNTAYLQMNNLKTEDTAVYYCVRHGNFGNSYI | |
| | | SYWAYWGQGTLVTVSSGGGGSGGGGSGGGGSQTVVTQEPSLTVSPGGTVTLTCGSSTGAVTSG | |
| | | NYPNWVQQKPGQAPRGLIGGTKFLAPGTPARFSGSLLGGKAALTLSGVQPEDEAEYYCVLWYS | |
| | | NRWVFGGGTKLTVLGGGGSQRFVTGHFGGLHPANGGGGGSGGGSRDWDFDVFGGGTPVGGHHH | |
| | | HHH | |
| 438. | CH19_2-D9xI2C6-LH-FcB- | QRFVTGHFGGLHPANGGGGGSQVQLQESGPGLVKPSQTLSLICTVSGGSISSGGYYWSWIRQH | |
| | LH-156 | PGKGLEWIGYIYYRGRTYYNPSLKSRVTISVDTSKNQFSLKLSSVTAADTAVYYCARVYSNYG | |
| | | WFDPWGQGTLVTVSSGGGGSGGGGSGGGGSEIVLIQSPGILSLSPGERATLSCRASQSVSSSY | |
| | | LAWYQQKPGQAPRLLIYGASSRATGIPDRFSGSGSGTDFTLTISRLEPEDFAVYYCQQYGSSP | |
| | | LTFGGGTKVEIKSGGGGSEVQLVESGGGLVQPGGSLKLSCAASGFTFNKYAMNWVRQAPGKGL | |
| | | EWVARIRSKYNNYATYYADSVKDRFTISRDDSKNTAYLQMNNLKTEDTAVYYCVRHGNFGNSY | |
| | | ISYWAYWGQGTLVTVSSGGGGSGGGGSGGGGSQTVVIQEPSLIVSPGGIVTLICGSSTGAVTS | |
| | | GNYPNWVQQKPGQAPRGLIGGTKFLAPGTPARFSGSLLGGKAALTLSGVQPEDEAEYYCVLWY | |
| | | SNRWVFGGGTKLIVLGGGGSQRFVTGHFGGLHPANGGGGGSGGGSRDWDFDVFGGGTPVGGHH | |
| | | HHHH | |
| 439. | CH19_8-H7xI2C6-LH-FcB- | QRFVTGHFGGLHPANGGGGGSQVQLQESGPGLVKPSQTLSLTCTVSGGSISSGGYYWSWVRQH | |
| | LH-156 | PGKGLEWIGYIFYSGRTYYNPSLKSRVIISVDTSKNQFSLKLSSVTAADTAVYYCARVYSNYG | |
| | | WFDPWGQGTLVTVSSGGGGSGGGGSGGGGSEIVLIQSPGILSLSPGERATLSCRASQSVSSSY | |
| | | LAWYQQKPGQAPRLLIYGASSRATGIPDRFSGSGSGIDFILTISRLEPEDFAVYYCQQYGSSP | |
| | | LTFGGGTKVEIKSGGGGSEVQLVESGGGLVQPGGSLKLSCAASGFTFNKYAMNWVRQAPGKGL | |
| | | EWVARIRSKYNNYATYYADSVKDRFTISRDDSKNTAYLQMNNLKTEDTAVYYCVRHGNFGNSY | |
| | | ISYWAYWGQGTLVTVSSGGGGSGGGGSGGGGSQTVVTQEPSLTVSPGGTVTLTCGSSTGAVTS | |
| | | GNYPNWVQQKPGQAPRGLIGGTKFLAPGTPARFSGSLLGGKAALTLSGVQPEDEAEYYCVLWY | |
| | | SNRWVFGGGTKLTVLGGGGSQRFVTGHFGGLHPANGGGGGSGGGSRDWDFDVFGGGTPVGGHH | |
| | | HHHH | |
| 440. | CH19_9-C2xI2C6-LH-FcB- | QRFVTGHFGGLHPANGGGGGSQVQLQESGPGLVKPSQTLSLTCTVSGGSISSGGYYWSWIRQH | |
| | LH-156 | PGKGLEWIGYIFYSGRTYYNPSLKSRVTISVDTSKNQFSLKLSSVTAADTAVYYCARVYSNYG | |
| | | WFDPWGQGTLVTVSSGGGGSGGGGSGGGGSEIVLIQSPGILSLSPGERATLSCRASQSVSSSY | |
| | | LAWYQQKPGQAPRLLIYGASSRATGIPDRFSGSGSGTDFTLTISRLEPEDFAVYYCQQYGSSP | |
| | | LTFGGGTKVEIKSGGGGSEVQLVESGGGLVQPGGSLKLSCAASGFTFNKYAMNWVRQAPGKGL | |
| | | EWVARIRSKYNNYATYYADSVKDRFTISRDDSKNTAYLQMNNLKTEDTAVYYCVRHGNFGNSY | |
| | | ISYWAYWGQGTLVTVSSGGGGSGGGGSGGGGSQTVVTQEPSLTVSPGGTVTLTCGSSTGAVTS | |
| | | GNYPNWVQQKPGQAPRGLIGGTKFLAPGTPARFSGSLLGGKAALTLSGVQPEDEAEYYCVLWY | |
| | | SNRWVFGGGTKLIVLGGGGSQRFVTGHFGGLHPANGGGGGSGGGSRDWDFDVFGGGTPVGGHH | |
| | | HHHH | |
| 441. | CH19_3-D5xI2C6-LH-FcB- | QRFVTGHFGGLHPANGGGGGSQVQLQESGPGLVKPSQTLSLTCTVSGGSISSGGYYWSWIRQH | |
| | LH-156 | PGKGLEWIGYIFYSGRTYYNPSLKSRVSISVDTSKNQFSLKLSSVTAADTAVYYCARVYSNYG | |
| | | WFDPWGQGTLVTVSSGGGGSGGGGSGGGGSEIVLTQSPGTLSLSPGERATLSCRASQSVSSSY | |
| | | LAWYQQKPGQAPRLLIYGASSRATGIPDRFSGSGSGTDFTLTISRLEPEDFAVYYCQQYGSSP | |
| | | LTFGGGTKVEIKSGGGGSEVQLVESGGGLVQPGGSLKLSCAASGFTFNKYAMNWVRQAPGKGL | |
| | | EWVARIRSKYNNYATYYADSVKDRFTISRDDSKNTAYLQMNNLKTEDTAVYYCVRHGNFGNSY | |
| | | ISYWAYWGQGTLVTVSSGGGGSGGGGSGGGGSQTVVTQEPSLTVSPGGTVTLTCGSSTGAVTS | |
| | | GNYPNWVQQKPGQAPRGLIGGTKFLAPGTPARFSGSLLGGKAALTLSGVQPEDEAEYYCVLWY | |
| | | SNRWVFGGGTKLTVLGGGGSQRFVTGHFGGLHPANGGGGGSGGGSRDWDFDVFGGGTPVGGHH | |
| | | HHHH | |
| 442. | CH19_1-G11xI2C6-LH- | QRFVTGHFGGLHPANGGGGGSQVQLQESGPGLVKPSETLSLTCTVSGGSVSSGGYYWSWIRQP | |
| | FcB-LH-156 | PGKGLEWIGYIYYRGRTYYNPSLKSRVTISVDTSKNQFSLKLSSVTAADTAVYYCARVYSNYG | |
| | | WFDPWGQGTLVTVSSGGGGSGGGGSGGGGSEIVLIQSPGILSLSPGERATLSCRASQSVSSSY | |
| | | LAWYQQKPGQAPRLLIYGASSRATGIPDRFSGSGSGTDFTLTISRLEPEDFAVYYCQQYGSSP | |
| | | LTFGGGTKVEIKSGGGGSEVQLVESGGGLVQPGGSLKLSCAASGFTFNKYAMNWVRQAPGKGL | |
| | | EWVARIRSKYNNYATYYADSVKDRFTISRDDSKNTAYLQMNNLKTEDTAVYYCVRHGNFGNSY | |
| | | ISYWAYWGQGTLVTVSSGGGGSGGGGSGGGGSQTVVIQEPSLIVSPGGIVTLICGSSTGAVIS | |
| | | GNYPNWVQQKPGQAPRGLIGGTKFLAPGTPARFSGSLLGGKAALTLSGVQPEDEAEYYCVLWY | |
| | | SNRWVFGGGTKLTVLGGGGSQRFVTGHFGGLHPANGGGGGSGGGSRDWDFDVFGGGTPVGGHH | |
| | | HHHH | |
| 443. | CH19_1-H11xI2C6-LH- | QRFVTGHFGGLHPANGGGGGSQVQLQESGPGLVKPSQTLSLTCTVSGGSISSGGYYWSWIRQH | |
| | FcB-LH-156 | PGKGLEWIGYIYYRGRTYYNPSLKSRVTISVDTSKNQFSLKLSSVTAADTAVYYCARVYSNYG | |
| | | WFDPWGQGTLVTVSSGGGGSGGGGSGGGGSEIVLIQSPGILSLSPGERATLSCRASQSVSSSY | |
| | | LAWYQQKPGQAPRLLIYGASSRATGIPDRFSGSGSGIDFTLTISRLEPEDFAVYYCQQYGSSP | |
| | | TFGQGTRLEIKSGGGGSEVQLVESGGGLVQPGGSLKLSCAASGFTFNKYAMNWVRQAPGKGLE | |
| | | WVARIRSKYNNYATYYADSVKDRFTISRDDSKNTAYLQMNNLKTEDTAVYYCVRHGNFGNSYI | |
| | | SYWAYWGQGTLVTVSSGGGGSGGGGSGGGGSQTVVTQEPSLTVSPGGTVTLTCGSSTGAVTSG | |
| | | NYPNWVQQKPGQAPRGLIGGIKFLAPGTPARFSGSLLGGKAALTLSGVQPEDEAEYYCVLWYS | |
| | | NRWVFGGGTKLTVLGGGGSQRFVTGHFGGLHPANGGGGGSGGGSRDWDFDVFGGGTPVGGHHH | |
| | | HHH | |
| 444. | CH19_9-F3xI2C6-LH-FcB- | QRFVTGHFGGLHPANGGGGGSQVQLQESGPGLVKPSQTLSLTCTVSGGSISSGGYYWSWIRQH | |
| | LH-156 | PGKGLEWIGYIFYSGKTYYNPSLKSRVSISVDTSKNQFSLKLSSVTAADTAVYYCARVYSNYG | |
| | | WFDPWGQGTLVTVSSGGGGSGGGGSGGGGSEIVLIQSPGILSLSPGERATLSCRASQSVSSSY | |
| | | LAWYQQKPGQAPRLLIYGASSRATGIPDRFSGSGSGTDFTLTISRLEPEDFAVYYCQQYGSSP | |
| | | ITFGQGTRLEIKSGGGGSEVQLVESGGGLVQPGGSLKLSCAASGFTFNKYAMNWVRQAPGKGL | |
| | | EWVARIRSKYNNYATYYADSVKDRFTISRDDSKNTAYLQMNNLKTEDTAVYYCVRHGNFGNSY | |
| | | ISYWAYWGQGTLVTVSSGGGGSGGGGSGGGGSQTVVTQEPSLTVSPGGTVTLTCGSSTGAVTS | |
| | | GNYPNWVQQKPGQAPRGLIGGTKFLAPGTPARFSGSLLGGKAALTLSGVQPEDEAEYYCVLWY | |
| | | SNRWVFGGGTKLTVLGGGGSQRFVTGHFGGLHPANGGGGGSGGGSRDWDFDVFGGGTPVGGHH | |
| | | HHHH | |
| 445. | CH19_2-G6xI2C6-LH-FcB- | QRFVTGHFGGLHPANGGGGGSQVQLQESGPGLVKPSETLSLTCTVSGGSISSYYWSWIRQPPG | |
| | LH-156 | KGLEWIGYIYYSGSTNYNPSLKSRVTMSIDTSKNQFSLKLISVTAADTAVYYCARDQRRIVAA | |
| | | GGYYYGMDVWGQGTIVIVSSGGGGSGGGGSGGGGSEIVLIQSPGILSLSPGERATLSCRASQS | |
| | | VSSSYLAWYQQKPGQAPRLLIYGASTRATGIPARFSGSGSGTDFTLTISRLEPEDFAVYYCQQ | |
| | | YGSSPFTFGPGTKVDIKSGGGGSEVQLVESGGGLVQPGGSLKLSCAASGFTFNKYAMNWVRQA | |
| | | PGKGLEWVARIRSKYNNYATYYADSVKDRFTISRDDSKNTAYLQMNNLKTEDTAVYYCVRHGN | |
| | | FGNSYISYWAYWGQGTLVTVSSGGGGSGGGGSGGGGSQTVVTQEPSLTVSPGGTVTLTCGSST | |
| | | GAVTSGNYPNWVQQKPGQAPRGLIGGTKFLAPGTPARFSGSLLGGKAALTLSGVQPEDEAEYY | |
| | | CVLWYSNRWVFGGGTKLTVLGGGGSQRFVTGHFGGLHPANGGGGGSGGGSRDWDFDVFGGGIP | |
| | | VGGHHHHHH | |
| 446. | CH19_2-H7xI2C6-LH-FcB- | QRFVTGHFGGLHPANGGGGGSQVQLQESGPGLVKPSQTLSLTCTVSGGSISSNDYYWSWIRQH | |
| | LH-156 | PGKGLEWIGYIYYSGSTFYNPSLKSRGAISVDTSKNQFSLKLTSVTAADTAVYYCARGVYRIG | |
| | | AFDIWGQGTMVTVSSGGGGSGGGGSGGGGSDIQMTQSPSSLSASVGDRVTITCRASQSISSYL | |
| | | NWYQQKPGKAPKSLIYAASSLQSGVPSKFSGSGSGTDFILTISSLQPEDIATYYCQQSYSTPQ | |
| | | AFGGGTKVDIKSGGGGSEVQLVESGGGLVQPGGSLKLSCAASGFTFNKYAMNWVRQAPGKGLE | |
| | | WVARIRSKYNNYATYYADSVKDRFTISRDDSKNTAYLQMNNLKTEDTAVYYCVRHGNFGNSYI | |
| | | SYWAYWGQGTLVTVSSGGGGSGGGGSGGGGSQTVVTQEPSLTVSPGGTVTLTCGSSTGAVTSG | |
| | | NYPNWVQQKPGQAPRGLIGGTKFLAPGTPARFSGSLLGGKAALTLSGVQPEDEAEYYCVLWYS | |
| | | NRWVFGGGTKLTVLGGGGSQRFVTGHFGGLHPANGGGGGSGGGSRDWDFDVFGGGTPVGGHHH | |
| | | HHH | |
| 447. | CH19_5-B3xI2C6-LH-FcB- | QRFVTGHFGGLHPANGGGGGSQVQLVQSGAEVKKPGASVKVSCKASGYTFTYYGISWVRQAPG | |
| | LH-156 | QGLEWMGWINPYGGETNYAQKLQGRVTMTTDTSTSTAYMELRSLRSDDTAVYYCARGSGGFDY | |
| | | WGQGTLVTVSSGGGGSGGGGSGGGGSDIVMTQTPLSLSVTPGEPASISCRSSQSLLHSNGYNY | |
| | | LDWYLQKPGQSPQLLTYLGSYRASGVPDRFSGSGSGTDFTLKISRVEAEDVGVYYCMQALQTP | |
| | | FTFGPGTKVDIKSGGGGSEVQLVESGGGLVQPGGSLKLSCAASGFTFNKYAMNWVRQAPGKGL | |
| | | EWVARIRSKYNNYATYYADSVKDRFTISRDDSKNTAYLQMNNLKTEDTAVYYCVRHGNFGNSY | |
| | | ISYWAYWGQGTLVTVSSGGGGSGGGGSGGGGSQTVVTQEPSLTVSPGGTVTLICGSSTGAVIS | |
| | | GNYPNWVQQKPGQAPRGLIGGTKFLAPGTPARFSGSLLGGKAALTLSGVQPEDEAEYYCVLWY | |
| | | SNRWVFGGGTKLTVLGGGGSQRFVTGHFGGLHPANGGGGGSGGGSRDWDFDVFGGGTPVGGHH | |
| | | HHHH | |
| 448. | CH19_5-E10xI2C6-LH- | QRFVTGHFGGLHPANGGGGGSQVQLVQSGAEVKKPGASVKVSCKASGYTFTYYGISWVRQAPG | |
| | FcB-LH-156 | QGLEWMGWINPYSGATNYAQKLQGRVTMTTDTSTSTAYMELRSLRSDDTAVYYCARGSGGFDY | |
| | | WGQGILVTVSSGGGGSGGGGSGGGGSDIVMTQTPLSLSVTPGEPASISCRSSQSLLHSNGYNY | |
| | | LDWYLQKPGQSPQLLIYLGSYRASGVPDRFSGSGSGTDFTLKISRVEAEDVGVYYCMQALQTP | |
| | | FTFGPGTKVDIKSGGGGSEVQLVESGGGLVQPGGSLKLSCAASGFTFNKYAMNWVRQAPGKGL | |
| | | EWVARIRSKYNNYATYYADSVKDRFTISRDDSKNTAYLQMNNLKTEDTAVYYCVRHGNFGNSY | |
| | | ISYWAYWGQGTLVTVSSGGGGSGGGGSGGGGSQTVVTQEPSLTVSPGGTVTLTCGSSTGAVTS | |
| | | GNYPNWVQQKPGQAPRGLIGGTKFLAPGTPARFSGSLLGGKAALTLSGVQPEDEAEYYCVLWY | |
| | | SNRWVFGGGTKLTVLGGGGSQRFVTGHFGGLHPANGGGGGSGGGSRDWDFDVFGGGTPVGGHH | |
| | | HHHH | |
| 449. | CH19_6-G10xI2C6-LH- | QRFVTGHFGGLHPANGGGGGSQVQLVQSGAEVKKPGASVKVSCKASGYTFTYYGISWVRQAPG | |
| | FcB-LH-156 | QGLEWMGWINPYTGKTNYAQKLQGRVTMTTDTSTSTAYMELRSLRSDDTAVYYCARGSGGFDY | |
| | | WGQGTLVTVSSGGGGSGGGGSGGGGSDIVMTQTPLSLSVTPGEPASISCRSSQSLLHSNGYNY | |
| | | LDWYLQKPGQSPQLLIYLGSYRASGVPDRFSGSGSGTDFTLKISRVEAEDVGVYYCMQALQTP | |
| | | FTFGPGTKVDIKSGGGGSEVQLVESGGGLVQPGGSLKLSCAASGFTFNKYAMNWVRQAPGKGL | |
| | | EWVARIRSKYNNYATYYADSVKDRFTISRDDSKNTAYLQMNNLKTEDTAVYYCVRHGNFGNSY | |
| | | ISYWAYWGQGTLVTVSSGGGGSGGGGSGGGGSQTVVTQEPSLTVSPGGTVTLTCGSSTGAVTS | |
| | | GNYPNWVQQKPGQAPRGLIGGTKFLAPGTPARFSGSLLGGKAALTLSGVQPEDEAEYYCVLWY | |
| | | SNRWVFGGGIKLTVLGGGGSQRFVIGHFGGLHPANGGGGGSGGGSRDWDFDVFGGGIPVGGHH | |
| | | HHHH | |
| 450. | CH19_4-H8xI2C6-LH-FcB- | QRFVTGHFGGLHPANGGGGGSQVQLVQSGAEVKKPGASVKVSCKASGYTFTYYGISWVRQAPG | |
| | LH-156 | QGLEWMGWINPYIGKTNYAQKLQGRVIMITDTSTSTAYMELRSLRSDDTAVYYCARGSGGFDY | |
| | | WGQGILVTVSSGGGGSGGGGSGGGGSDIVMTQTPLSLSVTPGEPASISCRSSQSLLHSVGYNY | |
| | | LDWYLQKPGQSPQLLIYLGSYRASGVPDRFSGSGSGIDFTLKISRVEAEDVGVYYCMQALQIP | |
| | | FTFGPGTKVDIKSGGGGSEVQLVESGGGLVQPGGSLKLSCAASGFTFNKYAMNWVRQAPGKGL | |
| | | EWVARIRSKYNNYATYYADSVKDRFTISRDDSKNTAYLQMNNLKTEDTAVYYCVRHGNFGNSY | |
| | | ISYWAYWGQGTLVTVSSGGGGSGGGGSGGGGSQTVVTQEPSLTVSPGGTVTLTCGSSTGAVTS | |
| | | GNYPNWVQQKPGQAPRGLIGGTKFLAPGTPARFSGSLLGGKAALTLSGVQPEDEAEYYCVLWY | |
| | | SNRWVFGGGTKLTVLGGGGSQRFVTGHFGGLHPANGGGGGSGGGSRDWDFDVFGGGTPVGGHH | |
| | | HHHH | |
| 451. | CH19_2-E4xI2C6-LH-FcB- | QRFVTGHFGGLHPANGGGGGSQVQLVQSGAEVKKPGASVKVSCKASGYTFTSYGISWVRQAPG | |
| | LH-156 | QGLEWMGWINPYIGNRNYAQKVQDRVTMTTDTSTNTAYMELSSLRSDDTAVYYCARGSGGFDY | |
| | | WGQGTLVTVSSGGGGSGGGGSGGGGSDIVMTQSPLSLPVTLGQPASISCRSSQSLLHSVGYNY | |
| | | LDWYLQKPGQSPQLLIYLGSNRASGVPDRFSGSGSGIDFTLKISRVEAEDVGVYYCMQALQIP | |
| | | FTFGPGTKLEIKSGGGGSEVQLVESGGGLVQPGGSLKLSCAASGFTFNKYAMNWVRQAPGKGL | |
| | | EWVARIRSKYNNYATYYADSVKDRFTISRDDSKNTAYLQMNNLKTEDTAVYYCVRHGNFGNSY | |
| | | ISYWAYWGQGTLVTVSSGGGGSGGGGSGGGGSQTVVIQEPSLIVSPGGIVTLICGSSIGAVIS | |
| | | GNYPNWVQQKPGQAPRGLIGGTKFLAPGTPARFSGSLLGGKAALTLSGVQPEDEAEYYCVLWY | |
| | | SNRWVFGGGIKLTVLGGGGSQRFVIGHFGGLHPANGGGGGSGGGSRDWDFDVFGGGIPVGGHH | |
| | | HHHH | |
| 452. | CH19_6-B8xI2C6-LH-FcB- | QRFVTGHFGGLHPANGGGGGSQVQLVQSGAEVKKPGASVKVSCKASGYTFTYYGISWVRQAPG | |
| | LH-156 | QGLEWMGWINPYTGKTNYAQKLQDRVTMTTDTSTNTAYMELRSLRSDDTAVYYCARGSGGFDY | |
| | | WGQGILVTVSSGGGGSGGGGSGGGGSDIVMTQTPLSLPVTPGEPASISCRSSQSLLHSVGYNY | |
| | | LDWYLQKPGQSPQLLIYLGSNRASGVPDRFSGSGSGIDFTLKISRVEAEDVGVYYCMQALQIP | |
| | | FTFGPGTKVDIKSGGGGSEVQLVESGGGLVQPGGSLKLSCAASGFTFNKYAMNWVRQAPGKGL | |
| | | EWVARIRSKYNNYATYYADSVKDRFTISRDDSKNTAYLQMNNLKTEDTAVYYCVRHGNFGNSY | |
| | | ISYWAYWGQGTLVTVSSGGGGSGGGGSGGGGSQTVVTQEPSLTVSPGGTVTLTCGSSTGAVTS | |
| | | GNYPNWVQQKPGQAPRGLIGGTKFLAPGTPARFSGSLLGGKAALTLSGVQPEDEAEYYCVLWY | |
| | | SNRWVFGGGTKLTVLGGGGSQRFVTGHFGGLHPANGGGGGSGGGSRDWDFDVFGGGTPVGGHH | |
| | | HHHH | |
| 453. | CH19_0-B4xI2C6-LH-FcB- | QRFVTGHFGGLHPANGGGGGSQVQLVQSGAEVKKPGASVKVSCKASGYTFTTYGISWVRQAPG | |
| | LH-156 | QGLEWMGWINPYTGKTNYAQKLQGRVTMATDTSTSTAYMELRSLRSDDTAVYYCARGSGGFDY | |
| | | WGQGTLVTVSSGGGGSGGGGSGGGGSDIVMTQSPLSLPVTPGEPASISCRSSQSLLHSVGYNY | |
| | | LDWYLQKPGQSPQLLIYLGSNRASGVPDRFSGSGSGTDFTLKISRVEAEDVGVYYCMQALQTP | |
| | | FTFGPGTKLEIKSGGGGSEVQLVESGGGLVQPGGSLKLSCAASGFTFNKYAMNWVRQAPGKGL | |
| | | EWVARIRSKYNNYATYYADSVKDRFTISRDDSKNTAYLQMNNLKTEDTAVYYCVRHGNFGNSY | |
| | | ISYWAYWGQGTLVTVSSGGGGSGGGGSGGGGSQTVVIQEPSLIVSPGGIVTLICGSSTGAVIS | |
| | | GNYPNWVQQKPGQAPRGLIGGTKFLAPGTPARFSGSLLGGKAALTLSGVQPEDEAEYYCVLWY | |
| | | SNRWVFGGGTKLTVLGGGGSQRFVTGHFGGLHPANGGGGGSGGGSRDWDFDVFGGGTPVGGHH | |
| | | HHHH | |
| 454. | CH19_9-F1xI2C6-LH-FcB- | QRFVIGHFGGLHPANGGGGGSQVQLVQSGAEVKEPGASVKVSCKASGYTFTYYGISWVRQAPG | |
| | LH-156 | QGLEWMGWINPYTGNRNYAQKVQDRVTMTTDTSTNTAYMELRSLRSDDTAVYYCARGSGGFDY | |
| | | WGQGTLVTVSSGGGGSGGGGSGGGGSDIVMTQSPLSLPVTPGEPASISCRSSQSLLHSVGYNY | |
| | | LDWYLQKPGQSPQLLTYLGSNRASGVPDRFSGSGSGIDFTLKISRVEAEDVGVYYCMQALQIP | |
| | | FTFGPGTKLEIKSGGGGSEVQLVESGGGLVQPGGSLKLSCAASGFTFNKYAMNWVRQAPGKGL | |
| | | EWVARIRSKYNNYATYYADSVKDRFTISRDDSKNTAYLQMNNLKTEDTAVYYCVRHGNFGNSY | |
| | | ISYWAYWGQGTLVTVSSGGGGSGGGGSGGGGSQTVVIQEPSLIVSPGGIVTLICGSSTGAVIS | |
| | | GNYPNWVQQKPGQAPRGLIGGTKFLAPGTPARFSGSLLGGKAALTLSGVQPEDEAEYYCVLWY | |
| | | SNRWVFGGGTKLTVLGGGGSQRFVTGHFGGLHPANGGGGGSGGGSRDWDFDVFGGGTPVGGHH | |
| | | HHHH | |
| 455. | CH19_4-A7xI2C6-LH-FcB- | QRFVTGHFGGLHPANGGGGGSQVQLVQSGAEVKKPGASVKVSCKASGYTFTYYGISWVRQAPG | |
| | LH-156 | QGLEWMGWINPYIGKTNYAQKLQGRVIMITDTSTSTAYMELRSLRSDDTAVYYCARGSGGFDY | |
| | | WGQGILVTVSSGGGGSGGGGSGGGGSDIVMTQSPLSLPVTPGEPASISCRSSQSLLHSVGYNY | |
| | | LDWYLQKPGQSPQLLTYLGSNRASGVPDRFSGSGSGIDFTLKISRVEAEDVGVYYCMQALQIP | |
| | | FTFGPGTKVEIKSGGGGSEVQLVESGGGLVQPGGSLKLSCAASGFTFNKYAMNWVRQAPGKGL | |
| | | EWVARIRSKYNNYATYYADSVKDRFTISRDDSKNTAYLQMNNLKTEDTAVYYCVRHGNFGNSY | |
| | | ISYWAYWGQGTLVTVSSGGGGSGGGGSGGGGSQTVVTQEPSLTVSPGGTVTLTCGSSTGAVTS | |
| | | GNYPNWVQQKPGQAPRGLIGGTKFLAPGTPARFSGSLLGGKAALTLSGVQPEDEAEYYCVLWY | |
| | | SNRWVFGGGTKLTVLGGGGSQRFVTGHFGGLHPANGGGGGSGGGSRDWDFDVFGGGTPVGGHH | |
| | | HHHH | |
| 456. | CH19_6-E12xI2C6-LH- | QRFVTGHFGGLHPANGGGGGSQVQLVQSGAEVKKPGASVKVSCKASGYTFTSYGITWVRQAPG | |
| | FcB-LH-156 | QGLEWMGWINPYTGNRNYAQKVQGRVTMTTDTSTSTAYMELRSLRSDDTAVYYCARGSGGFDY | |
| | | WGQGTLVTVSSGGGGSGGGGSGGGGSDIVMTQSPLSLSVTPGEPASISCRSSQSLLHSVGYNY | |
| | | LDWYLQKPGQSPQLLTYLGSNRASGVPDRFSGSGSGTDFTLKISRVEAEDVGVYYCMQALQTP | |
| | | FTFGPGTKVDIKSGGGGSEVQLVESGGGLVQPGGSLKLSCAASGFTFNKYAMNWVRQAPGKGL | |
| | | EWVARIRSKYNNYATYYADSVKDRFTISRDDSKNTAYLQMNNLKTEDTAVYYCVRHGNFGNSY | |
| | | ISYWAYWGQGTLVTVSSGGGGSGGGGSGGGGSQTVVTQEPSLTVSPGGTVTLTCGSSTGAVTS | |
| | | GNYPNWVQQKPGQAPRGLIGGTKFLAPGTPARFSGSLLGGKAALTLSGVQPEDEAEYYCVLWY | |
| | | SNRWVFGGGTKLTVLGGGGSQRFVTGHFGGLHPANGGGGGSGGGSRDWDFDVFGGGTPVGGHH | |
| | | HHHH | |
| 457. | CH19_6-C12xI2C6-LH- | QRFVTGHFGGLHPANGGGGGSQVQLVQSGAEVKKPGASVKVSCKASGYTFTSYGISWVRQAPG | |
| | FcB-LH-156 | QGLEWMGWINPYTGNRNYAQKFQGRVTMTTDTSTNTAYMELSSLRSEDTAVYYCARGSGGFDY | |
| | | WGQGTLVTVSSGGGGSGGGGSGGGGSDIVMTQSPLSLPVTPGEPASISCRSSQSLLHSVGYNY | |
| | | LDWYLQKPGQSPQLLTYLGSNRASGVPDRFSGSGSGIDFTLKISRVEAEDVGVYYCMQALQIP | |
| | | FTFGPGTKVDIKSGGGGSEVQLVESGGGLVQPGGSLKLSCAASGFTFNKYAMNWVRQAPGKGL | |
| | | EWVARIRSKYNNYATYYADSVKDRFTISRDDSKNTAYLQMNNLKTEDTAVYYCVRHGNFGNSY | |
| | | ISYWAYWGQGTLVTVSSGGGGSGGGGSGGGGSQTVVTQEPSLTVSPGGTVTLTCGSSTGAVTS | |
| | | GNYPNWVQQKPGQAPRGLIGGTKFLAPGTPARFSGSLLGGKAALTLSGVQPEDEAEYYCVLWY | |
| | | SNRWVFGGGTKLTVLGGGGSQRFVTGHFGGLHPANGGGGGSGGGSRDWDFDVFGGGTPVGGHH | |
| | | HHHH | |
| 458. | CH19_6-A7xI2C6-LH-FcB- | QRFVTGHFGGLHPANGGGGGSQVQLVQSGAEVKKPGASVKVSCKASGYSFTSYGISWVRQAPG | |
| | LH-156 | QGLEWMGWINPYTGNRNYAQKVQGRVTMTTDTSTSTAYMELRSLRSDDTAVYYCARGSGGFDY | |
| | | WGQGTLVTVSSGGGGSGGGGSGGGGSDIVMTQSPLSLPVTPGEPASISCRSSQSLLHSVGYNY | |
| | | LDWYLQKPGQSPQLLTYLGSNRASGVPDRFSGSGSGTDFTLKISRVEAEDVGVYYCMQALQTP | |
| | | FTFGPGTKVEIKSGGGGSEVQLVESGGGLVQPGGSLKLSCAASGFTFNKYAMNWVRQAPGKGL | |
| | | EWVARIRSKYNNYATYYADSVKDRFTISRDDSKNTAYLQMNNLKTEDTAVYYCVRHGNFGNSY | |
| | | ISYWAYWGQGTLVTVSSGGGGSGGGGSGGGGSQTVVIQEPSLIVSPGGIVTLICGSSIGAVIS | |
| | | GNYPNWVQQKPGQAPRGLIGGTKFLAPGTPARFSGSLLGGKAALTLSGVQPEDEAEYYCVLWY | |
| | | SNRWVFGGGIKLTVLGGGGSQRFVIGHFGGLHPANGGGGGSGGGSRDWDFDVFGGGIPVGGHH | |
| | | HHHH | |
| 459. | CH19_6-G8xI2C6-LH-FcB- | QRFVTGHFGGLHPANGGGGGSQVQLVQSGAEVKKPGASVKVSCKASGYTFTYYGISWVRQAPG | |
| | LH-156 | QGLEWMGWINPYIGKTNYAQKVQGRVIMITDTSTSTAYMELRNLRSDDTAVYYCARGSGGFDY | |
| | | WGQGTLVTVSSGGGGSGGGGSGGGGSDIVMTQTPLSLSVTPGQPASISCRSSQSLLHSVGYNY | |
| | | LDWYLQKPGQSPQLLTYLGSNRASGVPDRFSGSGSGIDFTLKISRVEAEDVGVYYCMQALQTP | |
| | | FTFGPGTKVDIKSGGGGSEVQLVESGGGLVQPGGSLKLSCAASGFTFNKYAMNWVRQAPGKGL | |
| | | EWVARIRSKYNNYATYYADSVKDRFTISRDDSKNTAYLQMNNLKTEDTAVYYCVRHGNFGNSY | |
| | | ISYWAYWGQGTLVTVSSGGGGSGGGGSGGGGSQTVVTQEPSLTVSPGGTVTLTCGSSTGAVTS | |
| | | GNYPNWVQQKPGQAPRGLIGGTKFLAPGTPARFSGSLLGGKAALTLSGVQPEDEAEYYCVLWY | |
| | | SNRWVFGGGTKLTVLGGGGSQRFVTGHFGGLHPANGGGGGSGGGSRDWDFDVFGGGTPVGGHH | |
| | | HHHH | |
| 460. | CH19_6-F9xI2C6-LH-FcB- | QRFVTGHFGGLHPANGGGGGSQVQLVQSGAEVKKPGASVKVSCKASGYTFTYYGISWVRQAPG | |
| | LH-156 | QGLEWMGWINPYTGKTNYAQKLQGRVTMTTDTSTSTAYMELRSLRSDDTAVYYCARGSGGFDY | |
| | | WGQGILVTVSSGGGGSGGGGSGGGGSDIVMTQTPLSLSVTPGQPASISCRSSQSLLHSVGYNY | |
| | | LDWYLQKPGQSPQLLIYLGSNRASGVPDRFSGSGSGTDFTLKISRVEAEDVGVYYCMQALQTP | |
| | | FTFGPGTKVDIKSGGGGSEVQLVESGGGLVQPGGSLKLSCAASGFTFNKYAMNWVRQAPGKGL | |
| | | EWVARIRSKYNNYATYYADSVKDRFTISRDDSKNTAYLQMNNLKTEDTAVYYCVRHGNFGNSY | |
| | | ISYWAYWGQGTLVTVSSGGGGSGGGGSGGGGSQTVVTQEPSLTVSPGGTVTLTCGSSTGAVTS | |
| | | GNYPNWVQQKPGQAPRGLIGGTKFLAPGTPARFSGSLLGGKAALTLSGVQPEDEAEYYCVLWY | |
| | | SNRWVFGGGTKLTVLGGGGSQRFVTGHFGGLHPANGGGGGSGGGSRDWDFDVFGGGTPVGGHH | |
| | | HHHH | |
| 461. | CH19_0-C11xI2C6-LH- | QRFVTGHFGGLHPANGGGGGSQVQLVESGGGVVQPGRSLRLSCAASGFTFRNYAMHWVRQAPG | |
| | FcB-LH-156 | KGLEWVAVISYSGNNKYYASSVKGRFTISRDNSKNTLYLQLNSLRAEDTAVYYCAREFYYDST | |
| | | GYDYSTPGDYWGQGTLVTVSSGGGGSGGGGSGGGGSDIQMTQSPSSLSASVGDRVTITCQASQ | |
| | | DISNYLNWYQQKPGKAPKLLIYDASNLETGVPSRFSGSGSGTDFTFTISSLQPEDIATYYCQQ | |
| | | YDNLPTFGQGTRLEIKSGGGGSEVQLVESGGGLVQPGGSLKLSCAASGFTFNKYAMNWVRQAP | |
| | | GKGLEWVARIRSKYNNYATYYADSVKDRFTISRDDSKNTAYLQMNNLKTEDTAVYYCVRHGNF | |
| | | GNSYISYWAYWGQGTLVTVSSGGGGSGGGGSGGGGSQTVVTQEPSLTVSPGGTVTLTCGSSTG | |
| | | AVTSGNYPNWVQQKPGQAPRGLIGGTKFLAPGTPARFSGSLLGGKAALTLSGVQPEDEAEYYC | |
| | | VLWYSNRWVEGGGIKLTVLGGGGSQRFVIGHFGGLHPANGGGGGSGGGSRDWDFDVFGGGIPV | |
| | | GGHHHHHH | |
| 462. | CH19_8-F6xI2C6-LH-FcB- | QRFVTGHFGGLHPANGGGGGSQVQLVESGGGVVQPGRSLRLSCVASGFTFRNYAMHWVRQAPG | |
| | LH-156 | KGLEWVAVISYSGNNKYYASSVKGRFTISRDNSKNTLYLQLNSLRAEDTAVYYCAREFYYDST | |
| | | GYDYSTPGDYWGQGTLVTVSSGGGGSGGGGSGGGGSDIQMTQSPSSLSASVGDRVTITCRASQ | |
| | | SISSYLNWYQQKPGKAPKLLIYDASSLQSGVPSRFSGSGSGTEFTLTISSLQAEDVAVYYCQQ | |
| | | YYSTPLTFGGGTKVDIKSGGGGSEVQLVESGGGLVQPGGSLKLSCAASGFTFNKYAMNWVRQA | |
| | | PGKGLEWVARIRSKYNNYATYYADSVKDRFTISRDDSKNTAYLQMNNLKTEDTAVYYCVRHGN | |
| | | FGNSYISYWAYWGQGTLVIVSSGGGGSGGGGSGGGGSQTVVIQEPSLIVSPGGIVTLICGSST | |
| | | GAVTSGNYPNWVQQKPGQAPRGLIGGTKFLAPGTPARFSGSLLGGKAALTLSGVQPEDEAEYY | |
| | | CVLWYSNRWVFGGGIKLIVLGGGGSQRFVTGHFGGLHPANGGGGGSGGGSRDWDFDVFGGGIP | |
| | | VGGHHHHHH | |
| 463. | CH19_0-G9xI2C6-LH-FcB- | QRFVTGHFGGLHPANGGGGGSQVQLVESGGGVVQPGRSLRLSCAASGFTFRNYAMHWVRQAPG | |
| | LH-156 | KGLEWVAGISYSGTNKYYASSVKGRFTISRDNSKNTLYLQLNSLRAEDTAVYYCAREFYYDST | |
| | | GYDYSTPGDYWGQGTLVTVSSGGGGSGGGGSGGGGSDIQMTQSPSSLSASVGDRVTITCQASQ | |
| | | DISNYLNWYQQKPGKAPKLLIYDASNLETGVPSRFSGSGSGTEFILTISSLQPEDIATYYCQQ | |
| | | YDNLPLTFGGGTKVDIKSGGGGSEVQLVESGGGLVQPGGSLKLSCAASGFTFNKYAMNWVRQA | |
| | | PGKGLEWVARIRSKYNNYATYYADSVKDRFTISRDDSKNTAYLQMNNLKTEDTAVYYCVRHGN | |
| | | FGNSYISYWAYWGQGTLVTVSSGGGGSGGGGSGGGGSQTVVTQEPSLTVSPGGTVTLTCGSST | |
| | | GAVTSGNYPNWVQQKPGQAPRGLIGGTKFLAPGTPARFSGSLLGGKAALTLSGVQPEDEAEYY | |
| | | CVLWYSNRWVFGGGIKLIVLGGGGSQRFVTGHFGGLHPANGGGGGSGGGSRDWDFDVFGGGTP | |
| | | VGGHHHHHH | |
| 464. | CH19_1-E11xI2C6-LH- | QRFVTGHFGGLHPANGGGGGSQVQLVESGGGVVQPGRSLRLSCVASGFTFRNYAMHWVRQAPG | |
| | FcB-LH-156 | KGLEWVAVISYSGNNKYYASSVKGRFTISRDNSKNTLFLQLNSLRAEDTAVYYCAREFYYDST | |
| | | GYDYSTPGNYWGQGTLVTVSSGGGGSGGGGSGGGGSDIQMTQSPSSLSASVGDRVTITCQASQ | |
| | | DISNYLNWYQQKPGKAPKLLIYDASNLETGVPSRFSGSGSGTDFTFTISSLQPEDIATYYCQQ | |
| | | YVNLPLTFGGGTKLEIKSGGGGSEVQLVESGGGLVQPGGSLKLSCAASGFTFNKYAMNWVRQA | |
| | | PGKGLEWVARIRSKYNNYATYYADSVKDRFTISRDDSKNTAYLQMNNLKTEDTAVYYCVRHGN | |
| | | FGNSYISYWAYWGQGTLVTVSSGGGGSGGGGSGGGGSQTVVTQEPSLTVSPGGTVTLTCGSST | |
| | | GAVTSGNYPNWVQQKPGQAPRGLIGGTKFLAPGTPARFSGSLLGGKAALTLSGVQPEDEAEYY | |
| | | CVLWYSNRWVFGGGIKLIVLGGGGSQRFVTGHFGGLHPANGGGGGSGGGSRDWDFDVFGGGTP | |
| | | VGGHHHHHH | |
| 465. | CH19_0-F5xI2C6-LH-FcB- | QRFVTGHFGGLHPANGGGGGSQVQLVESGGGVVQPGRSLRLSCAASGFTFSSYGMQWVRQAPG | |
| | LH-156 | KGLEWVAVIWYSGSNKYYASSVKGRFTISRDNSKNTLYLQMNSLRAEDTAVYYCARDGYPIFY | |
| | | RYYGMDVWGQGTIVIVSSGGGGSGGGGSGGGGSDIQMTQSPSSLSASVGDRVTITCRASQGIS | |
| | | NYLAWYQQKPGKVPKLLIYAASTLQSGVPSRFSGSGSGTDFTLTISSLQPEDVATYYCQKYNS | |
| | | APLTFGGGTKVEIKSGGGGSEVQLVESGGGLVQPGGSLKLSCAASGFTFNKYAMNWVRQAPGK | |
| | | GLEWVARIRSKYNNYATYYADSVKDRFTISRDDSKNTAYLQMNNLKTEDTAVYYCVRHGNFGN | |
| | | SYISYWAYWGQGTLVTVSSGGGGSGGGGSGGGGSQTVVTQEPSLTVSPGGTVTLTCGSSTGAV | |
| | | TSGNYPNWVQQKPGQAPRGLIGGTKFLAPGTPARFSGSLLGGKAALTLSGVQPEDEAEYYCVL | |
| | | WYSNRWVFGGGTKLTVLGGGGSQRFVTGHFGGLHPANGGGGGSGGGSRDWDFDVFGGGTPVGG | |
| | | HHHHHH | |
| 466. | CH19_1-E1xI2C6-LH-FcB- | QRFVTGHFGGLHPANGGGGGSQVQLVESGGGVVQPGRSLRLSCAASGFTFSSYGMHWVRQAPG | |
| | LH-156 | KGLEWVAVISYSGSNKYYASSVKGRFTISRDNSKNTLYLQMNSLRAEDTAVYYCARDGYPIFY | |
| | | RYYGMDVWGQGTTVTVSSGGGGSGGGGSGGGGSEIVLTQSPGTLSLSPGERATLSCRASQSVS | |
| | | SSYLAWYQQKPGQAPRLLIYGASSRATGIPDRFSGSGSGTDFTLIISRLEPEDLAVYYCQQYG | |
| | | TSPLTFGGGTKLEIKSGGGGSEVQLVESGGGLVQPGGSLKLSCAASGFTFNKYAMNWVRQAPG | |
| | | KGLEWVARIRSKYNNYATYYADSVKDRFTISRDDSKNTAYLQMNNLKTEDTAVYYCVRHGNFG | |
| | | NSYISYWAYWGQGTLVTVSSGGGGSGGGGSGGGGSQTVVTQEPSLTVSPGGTVTLTCGSSTGA | |
| | | VTSGNYPNWVQQKPGQAPRGLIGGTKFLAPGTPARFSGSLLGGKAALTLSGVQPEDEAEYYCV | |
| | | LWYSNRWVFGGGTKLTVLGGGGSQRFVTGHFGGLHPANGGGGGSGGGSRDWDFDVFGGGTPVG | |
| | | GHHHHHH | |
| 467. | CH19_1-E6xI2C6-LH-FcB- | QRFVTGHFGGLHPANGGGGGSQVQLVESGGGVVQPGRSLRLSCAASGFTFSSFGMHWVRQAPG | |
| | LH-156 | KGLEWVAFIWYSGSNKYYASSVKGRVTISRDNSKNTLYLQMNSLRAEDTAVYYCARDGYPIFY | |
| | | YYYGMDVWGQGTIVIVSSGGGGSGGGGSGGGGSEIVLIQSPGILSLSPGERAILSCRASQSVS | |
| | | SSYLAWYQQKPGQAPRLLIYGASSRATGIPDRFSGSGSGTDFTLIISRLEPEDFAVYYCQQYG | |
| | | SSPFTFGPGTRLEIKSGGGGSEVQLVESGGGLVQPGGSLKLSCAASGFTFNKYAMNWVRQAPG | |
| | | KGLEWVARIRSKYNNYATYYADSVKDRFTISRDDSKNTAYLQMNNLKTEDTAVYYCVRHGNFG | |
| | | NSYISYWAYWGQGTLVTVSSGGGGSGGGGSGGGGSQTVVTQEPSLTVSPGGTVTLTCGSSTGA | |
| | | VTSGNYPNWVQQKPGQAPRGLIGGTKFLAPGTPARFSGSLLGGKAALTLSGVQPEDEAEYYCV | |
| | | LWYSNRWVEGGGIKLTVLGGGGSQRFVTGHFGGLHPANGGGGGSGGGSRDWDFDVFGGGTPVG | |
| | | GHHHHHH | |
| 468. | CH19_2G6_302_VKGxI2C6- | QRFVTGHFGGLYPANGGGGGSQVQLVESGGGVVQPGGSLRLSCAASGFTFSSYGMHWVRQAPG | |
| | LY-FcB-LH-156 | KGLEWVAFIWYDGSNKYYADSVKGRFTISRDNSKNTLYLQMNSLRAEDTAVYYCARRAGIIGT | |
| | | IGYYYGMDVWGQGTTVTVSSGGGGSGGGGSGGGGSSYELTQPPSVSVSPGQTASITCSGDRLG | |
| | | EKYTSWYQQRPGQSPLLVIYQDTKRPSGIPERFSGSNSGNTATLIISGTQAMDEADYYCQAWE | |
| | | SSTVVFGGGTKLTVLSGGGGSEVQLVESGGGLVQPGGSLKLSCAASGFTFNKYAMNWVRQAPG | |
| | | KGLEWVARIRSKYNNYATYYADSVKDRFTISRDDSKNTAYLQMNNLKTEDTAVYYCVRHGNFG | |
| | | NSYISYWAYWGQGTLVTVSSGGGGSGGGGSGGGGSQTVVTQEPSLTVSPGGTVTLTCGSSTGA | |
| | | VTSGNYPNWVQQKPGQAPRGLIGGTKFLAPGTPARFSGSLLGGKAALTLSGVQPEDEAEYYCV | |
| | | LWYSNRWVFGGGTKLTVLGGGGSQRFVTGHFGGLHPANGGGGGSGGGSRDWDFDVFGGGTPVG | |
| | | GHHHHHH | |
| 469. | CH19_0-E11xI2C6-LY- | QRFVTGHFGGLYPANGGGGGSQVQLQESGPGLVKPSQTLSLTCTVSGGSISRGGYYWSWIRQH | |
| | FcB-LH-156 | PGKGLEWIGYIFYRGRTYYNPSLKSRVTISVDTSKNQFSLKLSSVTAADTAVYYCARVNSNYG | |
| | | WFDPWGQGTLVTVSSGGGGSGGGGSGGGGSEIVLTQFPGILSLSPGERATLSCRASQSVSSSY | |
| | | LAWYQQKPGQAPRLLIYGASSRATGIPDRFSGSGSGTDFTLTISRLEPEDFAVYYCQQYGSSP | |
| | | LTFGGGTKLEIKSGGGGSEVQLVESGGGLVQPGGSLKLSCAASGFTFNKYAMNWVRQAPGKGL | |
| | | EWVARIRSKYNNYATYYADSVKDRFTISRDDSKNTAYLQMNNLKTEDTAVYYCVRHGNFGNSY | |
| | | ISYWAYWGQGTLVTVSSGGGGSGGGGSGGGGSQTVVTQEPSLTVSPGGTVTLTCGSSTGAVTS | |
| | | GNYPNWVQQKPGQAPRGLIGGTKFLAPGTPARFSGSLLGGKAALTLSGVQPEDEAEYYCVLWY | |
| | | SNRWVFGGGTKLTVLGGGGSQRFVTGHFGGLHPANGGGGGSGGGSRDWDFDVFGGGTPVGGHH | |
| | | HHHH | |
| 470. | CH19_5-G4xI2C6-LY-FcB- | QRFVTGHFGGLYPANGGGGGSQVQLQESGPGLVKPSQTLSLTCTVSGGSISSGGYYWSWIRQH | |
| | LH-156 | PGKGLEWIGYIFYRGRTYYNPSLKSRVTISVDTSKNQFSLKLSSVTAADTAVYYCARVYSNYG | |
| | | WFDPWGQGTLVTVSSGGGGSGGGGSGGGGSEIVLIQSPGILSLSPGERATLSCRASQSVSSSY | |
| | | LAWYQQKPGQAPRLLIYGTSNRATGIPDRFSGSGSGTDFTLTISRLEPEDFAVYYCQQYGSSP | |
| | | LTFGGGTKLEIKSGGGGSEVQLVESGGGLVQPGGSLKLSCAASGFTFNKYAMNWVRQAPGKGL | |
| | | EWVARIRSKYNNYATYYADSVKDRFTISRDDSKNTAYLQMNNLKTEDTAVYYCVRHGNFGNSY | |
| | | ISYWAYWGQGTLVTVSSGGGGSGGGGSGGGGSQTVVTQEPSLTVSPGGTVTLTCGSSTGAVTS | |
| | | GNYPNWVQQKPGQAPRGLIGGTKFLAPGTPARFSGSLLGGKAALTLSGVQPEDEAEYYCVLWY | |
| | | SNRWVFGGGTKLTVLGGGGSQRFVTGHFGGLHPANGGGGGSGGGSRDWDFDVFGGGTPVGGHH | |
| | | HHHH | |
| 471. | CH19_8-H6xI2C6-LY-FcB- | QRFVTGHFGGLYPANGGGGGSQVQLQESGPGLVKPSQTLSLICTVSGGSISSGGYYWSWIRQH | |
| | LH-156 | PGKGLEWIGYIFYSGRTYYNPSLKSRVTISVDTSKNQFSLKLSSVTAADTAVYYCARVYSNYG | |
| | | WFDPWGQGTLVTVSSGGGGSGGGGSGGGGSEIVLIQSPGILSLSPGERATLSCRASQSVSSSY | |
| | | LAWYQQKPGQAPRLLIYGASSRATGIPDRFSGSGSGTDFTLTISRLEPEDFAVYYCQQYGSSP | |
| | | LTFGGGTKLEIKSGGGGSEVQLVESGGGLVQPGGSLKLSCAASGFTFNKYAMNWVRQAPGKGL | |
| | | EWVARIRSKYNNYATYYADSVKDRFTISRDDSKNTAYLQMNNLKTEDTAVYYCVRHGNFGNSY | |
| | | ISYWAYWGQGTLVTVSSGGGGSGGGGSGGGGSQTVVIQEPSLIVSPGGIVTLICGSSTGAVIS | |
| | | GNYPNWVQQKPGQAPRGLIGGTKFLAPGTPARFSGSLLGGKAALTLSGVQPEDEAEYYCVLWY | |
| | | SNRWVFGGGTKLTVLGGGGSQRFVTGHFGGLHPANGGGGGSGGGSRDWDFDVFGGGTPVGGHH | |
| | | HHHH | |
| 472. | CH19_2-C11xI2C6-LY- | QRFVTGHFGGLYPANGGGGGSQVQLQESGPGLVKPSQTLSLTCTVSGGSISSGGYYWSWIRQH | |
| | FcB-LH-156 | PGKGLEWIGYIFYSGRTYYNPSLKSRVTISVDTSKNQFSLKLRSVTAADTAVYYCARVYSNYG | |
| | | WFDPWGQGTLVTVSSGGGGSGGGGSGGGGSEIVLIQSPGILSLSPGERATLSCRASQSVSSSY | |
| | | LAWYQQKPGQAPRLLIYGASSRATGIPDRFSGSGSGIDFILTISRLEPEDFAVYYCQQYGSSP | |
| | | LTFGGGTKLEIKSGGGGSEVQLVESGGGLVQPGGSLKLSCAASGFTFNKYAMNWVRQAPGKGL | |
| | | EWVARIRSKYNNYATYYADSVKDRFTISRDDSKNTAYLQMNNLKTEDTAVYYCVRHGNFGNSY | |
| | | ISYWAYWGQGTLVTVSSGGGGSGGGGSGGGGSQTVVTQEPSLTVSPGGTVTLTCGSSTGAVTS | |
| | | GNYPNWVQQKPGQAPRGLIGGTKFLAPGTPARFSGSLLGGKAALTLSGVQPEDEAEYYCVLWY | |
| | | SNRWVFGGGTKLTVLGGGGSQRFVTGHFGGLHPANGGGGGSGGGSRDWDFDVFGGGTPVGGHH | |
| | | HHHH | |
| 473. | CH19_2-A10xI2C6-LY- | QRFVTGHFGGLYPANGGGGGSQVQLQESGPGLVKPSQTLSLTCTVSGGSISSGGYYWSWIRQH | |
| | FcB-LH-156 | PGKGLEWIGYIYYSGSTFYNPSLRSRVTISVDTSKNQFSLKLSSVTAADTAVYYCARDSSSSR | |
| | | ALDYWGQGTLVTVSSGGGGSGGGGSGGGGSEIVLIQSPGILSLSPGERATLSCRASQSVSSSY | |
| | | LAWYQQKPGQAPRLLIYGASSRATGIPDRFSGSGSGTDFTLTISRLEPEDFAVYYCQQYDSSP | |
| | | RTFGQGTKLEIKSGGGGSEVQLVESGGGLVQPGGSLKLSCAASGFTFNKYAMNWVRQAPGKGL | |
| | | EWVARIRSKYNNYATYYADSVKDRFTISRDDSKNTAYLQMNNLKTEDTAVYYCVRHGNFGNSY | |
| | | ISYWAYWGQGTLVTVSSGGGGSGGGGSGGGGSQTVVTQEPSLTVSPGGTVTLTCGSSTGAVTS | |
| | | GNYPNWVQQKPGQAPRGLIGGTKFLAPGTPARFSGSLLGGKAALTLSGVQPEDEAEYYCVLWY | |
| | | SNRWVFGGGTKLTVLGGGGSQRFVTGHFGGLHPANGGGGGSGGGSRDWDFDVFGGGTPVGGHH | |
| | | HHHH | |
| 474. | CH19_1-D10xI2C6-LY- | QRFVTGHFGGLYPANGGGGGSQVQLQESGPGLVKPSQTLSLTCTVSGGSISSGGYYWSWIRQH | |
| | FcB-LH-156 | PGKGLEWIGYIYYRGRTYYNPSLKSRVTISVDTSKNQFSLKLSSVTAADTAVYYCARVYSNYG | |
| | | WFDPWGQGTLVTVSSGGGGSGGGGSGGGGSEIVLTQSPGTLSLSPGERATLSCRASQSVSSSY | |
| | | LAWYQQKPGQAPRLLIYGASSRATGIPDRFSGSGSGTDFTLTISRLEPEDFAVYYCQQYGSSP | |
| | | LTFGGGTKLEIKSGGGGSEVQLVESGGGLVQPGGSLKLSCAASGFTFNKYAMNWVRQAPGKGL | |
| | | EWVARIRSKYNNYATYYADSVKDRFTISRDDSKNTAYLQMNNLKTEDTAVYYCVRHGNFGNSY | |
| | | ISYWAYWGQGTLVTVSSGGGGSGGGGSGGGGSQTVVTQEPSLTVSPGGTVTLTCGSSTGAVTS | |
| | | GNYPNWVQQKPGQAPRGLIGGTKFLAPGTPARFSGSLLGGKAALTLSGVQPEDEAEYYCVLWY | |
| | | SNRWVFGGGTKLTVLGGGGSQRFVTGHFGGLHPANGGGGGSGGGSRDWDFDVFGGGTPVGGHH | |
| | | HHHH | |
| 475. | CH19_9-F9xI2C6-LY-FcB- | QRFVTGHFGGLYPANGGGGGSQVQLQESGPGLVKPSETLSLTCTVSGGSISSGGYYWSWIRQH | |
| | LH-156 | PGKGLEWIGYIFYRGRTYYNPSLKSRVTISVDTSKNQFSLKLSSVTAADTAVYYCARVYSNYG | |
| | | WFDPWGQGTLVTVSSGGGGSGGGGSGGGGSEIVLIQSPGILSLSPGERATLSCRASQSVSSSY | |
| | | LAWYQQKPGQAPRLLIYGASSRATGIPDRFSGSGSGTDFTLTISRLEPEDFAVYYCQQYGSSP | |
| | | TFGGGTKVEIKSGGGGSEVQLVESGGGLVQPGGSLKLSCAASGFIFNKYAMNWVRQAPGKGLE | |
| | | WVARIRSKYNNYATYYADSVKDRFTISRDDSKNTAYLQMNNLKTEDTAVYYCVRHGNFGNSYI | |
| | | SYWAYWGQGTLVTVSSGGGGSGGGGSGGGGSQTVVTQEPSLTVSPGGTVTLTCGSSTGAVTSG | |
| | | NYPNWVQQKPGQAPRGLIGGTKFLAPGTPARFSGSLLGGKAALTLSGVQPEDEAEYYCVLWYS | |
| | | NRWVFGGGTKLTVLGGGGSQRFVTGHFGGLHPANGGGGGSGGGSRDWDFDVFGGGTPVGGHHH | |
| | | HHH | |
| 476. | CH19_1-H8xI2C6-LY-FcB- | QRFVTGHFGGLYPANGGGGGSQVQLQESGPGLVKPSQTLSLTCTVSGGSISSGGYYWSWIRQH | |
| | LH-156 | PGKGLEWIGYIFYRGRTYYNPSLKSRVTISVDTSKNQFSLKLSSVTAADTAVYYCARVYSNYG | |
| | | WFDPWGQGTLVTVSSGGGGSGGGGSGGGGSEIVLIQSPGILSLSPGERATLSCRASQSVSSSY | |
| | | LAWYQQKPGQAPRLLIYGASSRATGIPDRFSGSGSGIDFILTISRLEPEDFAVYYCQQYGSSP | |
| | | LTFGGGTKVEIKSGGGGSEVQLVESGGGLVQPGGSLKLSCAASGFTFNKYAMNWVRQAPGKGL | |
| | | EWVARIRSKYNNYATYYADSVKDRFTISRDDSKNTAYLQMNNLKTEDTAVYYCVRHGNFGNSY | |
| | | ISYWAYWGQGTLVTVSSGGGGSGGGGSGGGGSQTVVTQEPSLTVSPGGTVTLTCGSSTGAVTS | |
| | | GNYPNWVQQKPGQAPRGLIGGTKFLAPGTPARFSGSLLGGKAALTLSGVQPEDEAEYYCVLWY | |
| | | SNRWVFGGGTKLTVLGGGGSQRFVTGHFGGLHPANGGGGGSGGGSRDWDFDVFGGGTPVGGHH | |
| | | HHHH | |
| 477. | CH19_1-B12xI2C6-LY- | QRFVTGHFGGLYPANGGGGGSQVQLQESGPGLVKPSQTLSLTCTVSGGSISSGGYYWSWIRQH | |
| | FcB-LH-156 | PGKGLEWIGYIYYRGRTYYNPSLKSRVTISVDTSKNQFSLKLSSVTAADTAVYYCARVYSNYG | |
| | | WFDPWGQGTLVTVSSGGGGSGGGGSGGGGSEIVLIQSPGILSLSPGERATLSCRASQSVSSSY | |
| | | LAWYQQKPGQAPRLLIYGASSRATGIPDRFSGSGSGTDFTLTISRLEPEDFAVYYCQQYGSSP | |
| | | TFGPGTKVEIKSGGGGSEVQLVESGGGLVQPGGSLKLSCAASGFTFNKYAMNWVRQAPGKGLE | |
| | | WVARIRSKYNNYATYYADSVKDRFTISRDDSKNTAYLQMNNLKTEDTAVYYCVRHGNFGNSYI | |
| | | SYWAYWGQGTLVTVSSGGGGSGGGGSGGGGSQTVVTQEPSLTVSPGGTVTLTCGSSTGAVTSG | |
| | | NYPNWVQQKPGQAPRGLIGGIKFLAPGTPARFSGSLLGGKAALTLSGVQPEDEAEYYCVLWYS | |
| | | NRWVFGGGTKLTVLGGGGSQRFVTGHFGGLHPANGGGGGSGGGSRDWDFDVFGGGTPVGGHHH | |
| | | HHH | |
| 478. | CH19_0-C4xI2C6-LY-FcB- | QRFVIGHFGGLYPANGGGGGSQVQLQESGPGLVKPSQTLSLICTVSGGSISSGGYYWSWIRQH | |
| | LH-156 | PGKGLEWIGYIYYRGRTYYNPSLKSRVTISVDTSKNQFSLKLSSVTAADTAVYYCARVYSNYG | |
| | | WFDPWGQGTLVTVSSGGGGSGGGGSGGGGSEIVLIQSPGILSLSPGERATLSCRASQSVSSSY | |
| | | LAWYQQKPGQAPRLLIYGASSRATGIPDRFSGSGSGTDFTLTISRLEPEDFAVYYCQQYGSSP | |
| | | TFGGGTKVEIKSGGGGSEVQLVESGGGLVQPGGSLKLSCAASGFTFNKYAMNWVRQAPGKGLE | |
| | | WVARIRSKYNNYATYYADSVKDRFTISRDDSKNTAYLQMNNLKTEDTAVYYCVRHGNFGNSYI | |
| | | SYWAYWGQGTLVTVSSGGGGSGGGGSGGGGSQTVVTQEPSLTVSPGGTVTLTCGSSTGAVTSG | |
| | | NYPNWVQQKPGQAPRGLIGGIKFLAPGTPARFSGSLLGGKAALTLSGVQPEDEAEYYCVLWYS | |
| | | NRWVFGGGTKLTVLGGGGSQRFVTGHFGGLHPANGGGGGSGGGSRDWDFDVFGGGTPVGGHHH | |
| | | HHH | |
| 479. | CH19_3-F2xI2C6-LY-FcB- | QRFVTGHFGGLYPANGGGGGSQVQLQESGPGLVKPSQTLSLTCTISGGSISSGGYYWSWIRQH | |
| | LH-156 | PGKGLEWIGYIFYSGRTYYNPSLKSRVTISVDTSKNQFSLKLTSVTAADTAVYYCARVNSNYG | |
| | | WFDPWGQGTLVTVSSGGGGSGGGGSGGGGSEIVLIQSPGILSLSPGERATLSCRASQSVSSSY | |
| | | LAWYQQKPGQAPRLLIYGASSRATGIPDRFSGSGSGIDFTLTISRLEPEDFAVYYCQQYGSSP | |
| | | TFGGGTKVEIKSGGGGSEVQLVESGGGLVQPGGSLKLSCAASGFTFNKYAMNWVRQAPGKGLE | |
| | | WVARIRSKYNNYATYYADSVKDRFTISRDDSKNTAYLQMNNLKTEDTAVYYCVRHGNFGNSYI | |
| | | SYWAYWGQGTLVTVSSGGGGSGGGGSGGGGSQTVVTQEPSLTVSPGGTVTLTCGSSTGAVTSG | |
| | | NYPNWVQQKPGQAPRGLIGGTKFLAPGTPARFSGSLLGGKAALTLSGVQPEDEAEYYCVLWYS | |
| | | NRWVFGGGTKLTVLGGGGSQRFVTGHFGGLHPANGGGGGSGGGSRDWDFDVFGGGTPVGGHHH | |
| | | HHH | |
| 480. | CH19_3-B10xI2C6-LY- | QRFVTGHFGGLYPANGGGGGSQVQLQESGPGLVKPSQTLSLTCTVSGGSISSGGYYWSWIRQH | |
| | FcB-LH-156 | PGKGLDWIGYIFYRGRTYYNPSLKSRVTISVDTSKNQFSLKLSSVTAADTAVYYCARVNSNYG | |
| | | WFDPWGQGTLVTVSSGGGGSGGGGSGGGGSEIVLIQSPGILSLSPGERATLSCRASQSVSSSY | |
| | | LAWYQQKPGQAPRLLIYGASSRATGIPDRFSGSGSGTDFTLTISRLEPEDFAVYYCQQYGSSP | |
| | | LTFGGGTKVEIKSGGGGSEVQLVESGGGLVQPGGSLKLSCAASGFTFNKYAMNWVRQAPGKGL | |
| | | EWVARIRSKYNNYATYYADSVKDRFTISRDDSKNTAYLQMNNLKTEDTAVYYCVRHGNFGNSY | |
| | | ISYWAYWGQGTLVTVSSGGGGSGGGGSGGGGSQTVVTQEPSLTVSPGGTVTLICGSSTGAVIS | |
| | | GNYPNWVQQKPGQAPRGLIGGTKFLAPGTPARFSGSLLGGKAALTLSGVQPEDEAEYYCVLWY | |
| | | SNRWVFGGGTKLTVLGGGGSQRFVTGHFGGLHPANGGGGGSGGGSRDWDFDVFGGGTPVGGHH | |
| | | HHHH | |
| 481. | CH19_0-G4xI2C6-LY-FcB- | QRFVTGHFGGLYPANGGGGGSQVQLQESGPGLVKPSQTLSLTCTVSGGSISSGGYYWSWIRQH | |
| | LH-156 | PGKGLEWIGYIYYRGRTYYNPSLKSRVTISVDTSKNQFSLKLSSVTAADTAVYYCARVYSNYG | |
| | | WFDPWGQGTLVTVSSGGGGSGGGGSGGGGSEIVLIQSPGILSLSPGERATLSCRASQSVSSSY | |
| | | LAWYQQKPGQAPRLLIYGASTRATGIPDRFSGSGSGTDFTLTISRLEPEDFAVYYCQQYGSSP | |
| | | SFGQGTKVEIKSGGGGSEVQLVESGGGLVQPGGSLKLSCAASGFTFNKYAMNWVRQAPGKGLE | |
| | | WVARIRSKYNNYATYYADSVKDRFTISRDDSKNTAYLQMNNLKTEDTAVYYCVRHGNFGNSYI | |
| | | SYWAYWGQGTLVTVSSGGGGSGGGGSGGGGSQTVVTQEPSLTVSPGGTVTLTCGSSTGAVTSG | |
| | | NYPNWVQQKPGQAPRGLIGGIKFLAPGTPARFSGSLLGGKAALTLSGVQPEDEAEYYCVLWYS | |
| | | NRWVFGGGTKLTVLGGGGSQRFVTGHFGGLHPANGGGGGSGGGSRDWDFDVFGGGTPVGGHHH | |
| | | HHH | |
| 482. | CH19_0-H5xI2C6-LY-FcB- | QRFVTGHFGGLYPANGGGGGSQVQLQESGPGLVRPSQTLSLICTVSGGSISSGGYYWSWIRQH | |
| | LH-156 | PGKGLEWIGYIYYRGRTYYNPSLKSRVTISVDTSKNQFSLKLSSVTAADTAVYYCARVYSNYG | |
| | | WFDPWGQGTLVTVSSGGGGSGGGGSGGGGSEIVLTQSPGTLSLSPGERATLSCRASQSVSSSY | |
| | | LAWYQQKPGQAPRLLIYGASSRATGIPDRFSGSGSGTDFTLTISRLEPEDFAVYYCQQYDTSP | |
| | | LTFGGGTKVEIKSGGGGSEVQLVESGGGLVQPGGSLKLSCAASGFTFNKYAMNWVRQAPGKGL | |
| | | EWVARIRSKYNNYATYYADSVKDRFTISRDDSKNTAYLQMNNLKTEDTAVYYCVRHGNFGNSY | |
| | | ISYWAYWGQGTLVTVSSGGGGSGGGGSGGGGSQTVVTQEPSLTVSPGGTVTLTCGSSTGAVTS | |
| | | GNYPNWVQQKPGQAPRGLIGGTKFLAPGTPARFSGSLLGGKAALTLSGVQPEDEAEYYCVLWY | |
| | | SNRWVFGGGTKLTVLGGGGSQRFVTGHFGGLHPANGGGGGSGGGSRDWDFDVFGGGTPVGGHH | |
| | | HHHH | |
| 483. | CH19_0-B8xI2C6-LY-FcB- | QRFVTGHFGGLYPANGGGGGSQVQLQESGPGLVKPSQTLSLTCTVSGGSISSGGYYWSWIRQH | |
| | LH-156 | PGKGLEWIGYIYYRGRTYYNPSLKSRVTISVDTSKNQFSLKLSSVTAADTAVYYCARVYSNYG | |
| | | WFDPWGQGTLVTVSSGGGGSGGGGSGGGGSEIVLTQSPGTLSLSPGERATLSCRASQSVSSSY | |
| | | LAWYQQKPGQAPRLLIYGASSRATGIPDRFSGSGSGIDFILTISRLEPEDFAVYYCQQYGSSP | |
| | | TFGGGTKVEIKSGGGGSEVQLVESGGGLVQPGGSLKLSCAASGFTFNKYAMNWVRQAPGKGLE | |
| | | WVARIRSKYNNYATYYADSVKDRFTISRDDSKNTAYLQMNNLKTEDTAVYYCVRHGNFGNSYI | |
| | | SYWAYWGQGTLVTVSSGGGGSGGGGSGGGGSQTVVTQEPSLTVSPGGTVTLTCGSSTGAVTSG | |
| | | NYPNWVQQKPGQAPRGLIGGIKFLAPGTPARFSGSLLGGKAALTLSGVQPEDEAEYYCVLWYS | |
| | | NRWVFGGGTKLTVLGGGGSQRFVTGHFGGLHPANGGGGGSGGGSRDWDFDVFGGGTPVGGHHH | |
| | | HHH | |
| 484. | CH19_2-D9xI2C6-LY-FcB- | QRFVTGHFGGLYPANGGGGGSQVQLQESGPGLVKPSQTLSLTCTVSGGSISSGGYYWSWIRQH | |
| | LH-156 | PGKGLEWIGYIYYRGRTYYNPSLKSRVTISVDTSKNQFSLKLSSVTAADTAVYYCARVYSNYG | |
| | | WFDPWGQGTLVTVSSGGGGSGGGGSGGGGSEIVLIQSPGILSLSPGERATLSCRASQSVSSSY | |
| | | LAWYQQKPGQAPRLLIYGASSRATGIPDRFSGSGSGIDFILTISRLEPEDFAVYYCQQYGSSP | |
| | | LTFGGGTKVEIKSGGGGSEVQLVESGGGLVQPGGSLKLSCAASGFTFNKYAMNWVRQAPGKGL | |
| | | EWVARIRSKYNNYATYYADSVKDRFTISRDDSKNTAYLQMNNLKTEDTAVYYCVRHGNFGNSY | |
| | | ISYWAYWGQGTLVTVSSGGGGSGGGGSGGGGSQTVVIQEPSLIVSPGGIVTLICGSSTGAVTS | |
| | | GNYPNWVQQKPGQAPRGLIGGTKFLAPGTPARFSGSLLGGKAALTLSGVQPEDEAEYYCVLWY | |
| | | SNRWVFGGGTKLIVLGGGGSQRFVTGHFGGLHPANGGGGGSGGGSRDWDFDVFGGGTPVGGHH | |
| | | HHHH | |
| 485. | CH19_8-H7xI2C6-LY-FcB- | QRFVTGHFGGLYPANGGGGGSQVQLQESGPGLVKPSQTLSLTCTVSGGSISSGGYYWSWVRQH | |
| | LH-156 | PGKGLEWIGYIFYSGRTYYNPSLKSRVIISVDTSKNQFSLKLSSVTAADTAVYYCARVYSNYG | |
| | | WFDPWGQGTLVTVSSGGGGSGGGGSGGGGSEIVLTQSPGTLSLSPGERATLSCRASQSVSSSY | |
| | | LAWYQQKPGQAPRLLIYGASSRATGIPDRFSGSGSGIDFILTISRLEPEDFAVYYCQQYGSSP | |
| | | LTFGGGTKVEIKSGGGGSEVQLVESGGGLVQPGGSLKLSCAASGFTFNKYAMNWVRQAPGKGL | |
| | | EWVARIRSKYNNYATYYADSVKDRFTISRDDSKNTAYLQMNNLKTEDTAVYYCVRHGNFGNSY | |
| | | ISYWAYWGQGTLVTVSSGGGGSGGGGSGGGGSQTVVTQEPSLTVSPGGTVTLTCGSSTGAVTS | |
| | | GNYPNWVQQKPGQAPRGLIGGTKFLAPGTPARFSGSLLGGKAALTLSGVQPEDEAEYYCVLWY | |
| | | SNRWVFGGGTKLTVLGGGGSQRFVTGHFGGLHPANGGGGGSGGGSRDWDFDVFGGGTPVGGHH | |
| | | HHHH | |
| 486. | CH19_9-C2xI2C6-LY-FcB- | QRFVTGHFGGLYPANGGGGGSQVQLQESGPGLVKPSQTLSLTCTVSGGSISSGGYYWSWIRQH | |
| | LH-156 | PGKGLEWIGYIFYSGRTYYNPSLKSRVTISVDTSKNQFSLKLSSVTAADTAVYYCARVYSNYG | |
| | | WFDPWGQGTLVTVSSGGGGSGGGGSGGGGSEIVLIQSPGILSLSPGERATLSCRASQSVSSSY | |
| | | LAWYQQKPGQAPRLLIYGASSRATGIPDRFSGSGSGTDFTLTISRLEPEDFAVYYCQQYGSSP | |
| | | LTFGGGTKVEIKSGGGGSEVQLVESGGGLVQPGGSLKLSCAASGFTFNKYAMNWVRQAPGKGL | |
| | | EWVARIRSKYNNYATYYADSVKDRFTISRDDSKNTAYLQMNNLKTEDTAVYYCVRHGNFGNSY | |
| | | ISYWAYWGQGTLVTVSSGGGGSGGGGSGGGGSQTVVTQEPSLTVSPGGTVTLTCGSSTGAVTS | |
| | | GNYPNWVQQKPGQAPRGLIGGTKFLAPGTPARFSGSLLGGKAALTLSGVQPEDEAEYYCVLWY | |
| | | SNRWVFGGGTKLTVLGGGGSQRFVTGHFGGLHPANGGGGGSGGGSRDWDFDVFGGGTPVGGHH | |
| | | HHHH | |
| 487. | CH19_3-D5xI2C6-LY-FcB- | QRFVTGHFGGLYPANGGGGGSQVQLQESGPGLVKPSQTLSLTCTVSGGSISSGGYYWSWIRQH | |
| | LH-156 | PGKGLEWIGYIFYSGRTYYNPSLKSRVSISVDTSKNQFSLKLSSVTAADTAVYYCARVYSNYG | |
| | | WFDPWGQGTLVTVSSGGGGSGGGGSGGGGSEIVLTQSPGTLSLSPGERATLSCRASQSVSSSY | |
| | | LAWYQQKPGQAPRLLIYGASSRATGIPDRFSGSGSGIDFILTISRLEPEDFAVYYCQQYGSSP | |
| | | LTFGGGTKVEIKSGGGGSEVQLVESGGGLVQPGGSLKLSCAASGFTFNKYAMNWVRQAPGKGL | |
| | | EWVARIRSKYNNYATYYADSVKDRFTISRDDSKNTAYLQMNNLKTEDTAVYYCVRHGNFGNSY | |
| | | ISYWAYWGQGTLVTVSSGGGGSGGGGSGGGGSQTVVIQEPSLIVSPGGIVTLICGSSTGAVIS | |
| | | GNYPNWVQQKPGQAPRGLIGGTKFLAPGTPARFSGSLLGGKAALTLSGVQPEDEAEYYCVLWY | |
| | | SNRWVFGGGTKLTVLGGGGSQRFVTGHFGGLHPANGGGGGSGGGSRDWDFDVFGGGTPVGGHH | |
| | | HHHH | |
| 488. | CH19_1-G1xI2C6-LY- | QRFVTGHFGGLYPANGGGGGSQVQLQESGPGLVKPSETLSLTCTVSGGSVSSGGYYWSWIRQP | |
| | FcB-LII-156 | PGKGLEWIGYIYYRGRTYYNPSLKSRVTISVDTSKNQFSLKLSSVTAADTAVYYCARVYSNYG | |
| | | WFDPWGQGTLVTVSSGGGGSGGGGSGGGGSEIVLIQSPGILSLSPGERATLSCRASQSVSSSY | |
| | | LAWYQQKPGQAPRLLIYGASSRATGIPDRFSGSGSGIDFILTISRLEPEDFAVYYCQQYGSSP | |
| | | LTFGGGTKVEIKSGGGGSEVQLVESGGGLVQPGGSLKLSCAASGFTFNKYAMNWVRQAPGKGL | |
| | | EWVARIRSKYNNYATYYADSVKDRFTISRDDSKNTAYLQMNNLKTEDTAVYYCVRHGNFGNSY | |
| | | ISYWAYWGQGTLVTVSSGGGGSGGGGSGGGGSQTVVIQEPSLIVSPGGIVTLICGSSTGAVIS | |
| | | GNYPNWVQQKPGQAPRGLIGGTKFLAPGTPARFSGSLLGGKAALTLSGVQPEDEAEYYCVLWY | |
| | | SNRWVFGGGTKLTVLGGGGSQRFVIGHFGGLHPANGGGGGSGGGSRDWDFDVFGGGIPVGGHH | |
| | | HHHH | |
| 489. | CH19_1-H11xI2C6-LY- | QRFVTGHFGGLYPANGGGGGSQVQLQESGPGLVKPSQTLSLTCTVSGGSISSGGYYWSWIRQH | |
| | FcB-LH-156 | PGKGLEWIGYIYYRGRTYYNPSLKSRVTISVDTSKNQFSLKLSSVTAADTAVYYCARVYSNYG | |
| | | WFDPWGQGTLVTVSSGGGGSGGGGSGGGGSEIVLIQSPGILSLSPGERATLSCRASQSVSSSY | |
| | | LAWYQQKPGQAPRLLIYGASSRATGIPDRFSGSGSGTDFTLTISRLEPEDFAVYYCQQYGSSP | |
| | | TFGQGTRLEIKSGGGGSEVQLVESGGGLVQPGGSLKLSCAASGFTFNKYAMNWVRQAPGKGLE | |
| | | WVARIRSKYNNYATYYADSVKDRFTISRDDSKNTAYLQMNNLKTEDTAVYYCVRHGNFGNSYI | |
| | | SYWAYWGQGTLVTVSSGGGGSGGGGSGGGGSQTVVTQEPSLTVSPGGTVTLTCGSSTGAVTSG | |
| | | NYPNWVQQKPGQAPRGLIGGIKFLAPGTPARFSGSLLGGKAALTLSGVQPEDEAEYYCVLWYS | |
| | | NRWVFGGGTKLTVLGGGGSQRFVTGHFGGLHPANGGGGGSGGGSRDWDFDVFGGGTPVGGHHH | |
| | | HHH | |
| 490. | CH19_9-F3xI2C6-LY-FcB- | QRFVTGHFGGLYPANGGGGGSQVQLQESGPGLVKPSQTLSLTCTVSGGSISSGGYYWSWIRQH | |
| | LH-156 | PGKGLEWIGYIFYSGKTYYNPSLKSRVSISVDTSKNQFSLKLSSVTAADTAVYYCARVYSNYG | |
| | | WFDPWGQGTLVTVSSGGGGSGGGGSGGGGSEIVLIQSPGILSLSPGERATLSCRASQSVSSSY | |
| | | LAWYQQKPGQAPRLLIYGASSRATGIPDRFSGSGSGTDFTLTISRLEPEDFAVYYCQQYGSSP | |
| | | ITFGQGTRLEIKSGGGGSEVQLVESGGGLVQPGGSLKLSCAASGFTFNKYAMNWVRQAPGKGL | |
| | | EWVARIRSKYNNYATYYADSVKDRFTISRDDSKNTAYLQMNNLKTEDTAVYYCVRHGNFGNSY | |
| | | ISYWAYWGQGTLVTVSSGGGGSGGGGSGGGGSQTVVTQEPSLTVSPGGTVTLTCGSSTGAVTS | |
| | | GNYPNWVQQKPGQAPRGLIGGTKFLAPGTPARFSGSLLGGKAALTLSGVQPEDEAEYYCVLWY | |
| | | SNRWVFGGGTKLTVLGGGGSQRFVTGHFGGLHPANGGGGGSGGGSRDWDFDVFGGGTPVGGHH | |
| | | HHHH | |
| 491. | CH19_2-G6xI2C6-LY-FcB- | QRFVTGHFGGLYPANGGGGGSQVQLQESGPGLVKPSETLSLTCTVSGGSISSYYWSWIRQPPG | |
| | LH-156 | KGLEWIGYIYYSGSTNYNPSLKSRVTMSIDTSKNQFSLKLISVTAADTAVYYCARDQRRIVAA | |
| | | GGYYYGMDVWGQGTIVIVSSGGGGSGGGGSGGGGSEIVLIQSPGILSLSPGERATLSCRASQS | |
| | | VSSSYLAWYQQKPGQAPRLLIYGASTRATGIPARFSGSGSGTDFTLTISRLEPEDFAVYYCQQ | |
| | | YGSSPFTFGPGTKVDIKSGGGGSEVQLVESGGGLVQPGGSLKLSCAASGFTFNKYAMNWVRQA | |
| | | PGKGLEWVARIRSKYNNYATYYADSVKDRFTISRDDSKNTAYLQMNNLKTEDTAVYYCVRHGN | |
| | | FGNSYISYWAYWGQGTLVTVSSGGGGSGGGGSGGGGSQTVVTQEPSLIVSPGGIVTLICGSST | |
| | | GAVTSGNYPNWVQQKPGQAPRGLIGGTKFLAPGTPARFSGSLLGGKAALTLSGVQPEDEAEYY | |
| | | CVLWYSNRWVFGGGIKLTVLGGGGSQRFVTGHFGGLHPANGGGGGSGGGSRDWDFDVFGGGIP | |
| | | VGGHHHHHH | |
| 492. | CH19_2-H7xI2C6-LY-FcB- | QRFVTGHFGGLYPANGGGGGSQVQLQESGPGLVKPSQTLSLTCTVSGGSISSNDYYWSWIRQH | |
| | LH-156 | PGKGLEWIGYIYYSGSTFYNPSLKSRGAISVDTSKNQFSLKLTSVTAADTAVYYCARGVYRIG | |
| | | AFDIWGQGTMVTVSSGGGGSGGGGSGGGGSDIQMTQSPSSLSASVGDRVTITCRASQSISSYL | |
| | | NWYQQKPGKAPKSLIYAASSLQSGVPSKFSGSGSGTDFILTISSLQPEDIATYYCQQSYSTPQ | |
| | | AFGGGTKVDIKSGGGGSEVQLVESGGGLVQPGGSLKLSCAASGFTFNKYAMNWVRQAPGKGLE | |
| | | WVARIRSKYNNYATYYADSVKDRFTISRDDSKNTAYLQMNNLKTEDTAVYYCVRHGNFGNSYI | |
| | | SYWAYWGQGTLVTVSSGGGGSGGGGSGGGGSQTVVTQEPSLTVSPGGTVTLTCGSSTGAVTSG | |
| | | NYPNWVQQKPGQAPRGLIGGTKFLAPGTPARFSGSLLGGKAALTLSGVQPEDEAEYYCVLWYS | |
| | | NRWVFGGGTKLTVLGGGGSQRFVTGHFGGLHPANGGGGGSGGGSRDWDFDVFGGGTPVGGHHH | |
| | | HHH | |
| 493. | CH19_5-B3xI2C6-LY-FcB- | QRFVTGHFGGLYPANGGGGGSQVQLVQSGAEVKKPGASVKVSCKASGYTFTYYGISWVRQAPG | |
| | LH-156 | QGLEWMGWINPYGGETNYAQKLQGRVTMTTDTSTSTAYMELRSLRSDDTAVYYCARGSGGFDY | |
| | | WGQGTLVTVSSGGGGSGGGGSGGGGSDIVMTQTPLSLSVTPGEPASISCRSSQSLLHSNGYNY | |
| | | LDWYLQKPGQSPQLLIYLGSYRASGVPDRFSGSGSGTDFTLKISRVEAEDVGVYYCMQALQTP | |
| | | FTFGPGTKVDIKSGGGGSEVQLVESGGGLVQPGGSLKLSCAASGFTFNKYAMNWVRQAPGKGL | |
| | | EWVARIRSKYNNYATYYADSVKDRFTISRDDSKNTAYLQMNNLKTEDTAVYYCVRHGNFGNSY | |
| | | ISYWAYWGQGTLVTVSSGGGGSGGGGSGGGGSQTVVTQEPSLTVSPGGTVTLTCGSSTGAVTS | |
| | | GNYPNWVQQKPGQAPRGLIGGTKFLAPGTPARFSGSLLGGKAALTLSGVQPEDEAEYYCVLWY | |
| | | SNRWVFGGGTKLTVLGGGGSQRFVTGHFGGLHPANGGGGGSGGGSRDWDFDVFGGGTPVGGHH | |
| | | HHHH | |
| 494. | CH19_5-E10xI2C6-LY- | QRFVTGHFGGLYPANGGGGGSQVQLVQSGAEVKKPGASVKVSCKASGYTFTYYGISWVRQAPG | |
| | FcB-LH-156 | QGLEWMGWINPYSGATNYAQKLQGRVTMTTDTSTSTAYMELRSLRSDDTAVYYCARGSGGFDY | |
| | | WGQGILVTVSSGGGGSGGGGSGGGGSDIVMTQTPLSLSVTPGEPASISCRSSQSLLHSNGYNY | |
| | | LDWYLQKPGQSPQLLIYLGSYRASGVPDRFSGSGSGTDFTLKISRVEAEDVGVYYCMQALQTP | |
| | | FTFGPGTKVDIKSGGGGSEVQLVESGGGLVQPGGSLKLSCAASGFTFNKYAMNWVRQAPGKGL | |
| | | EWVARIRSKYNNYATYYADSVKDRFTISRDDSKNTAYLQMNNLKTEDTAVYYCVRHGNFGNSY | |
| | | ISYWAYWGQGTLVTVSSGGGGSGGGGSGGGGSQTVVTQEPSLTVSPGGTVTLTCGSSTGAVTS | |
| | | GNYPNWVQQKPGQAPRGLIGGTKFLAPGTPARFSGSLLGGKAALTLSGVQPEDEAEYYCVLWY | |
| | | SNRWVFGGGTKLTVLGGGGSQRFVTGHFGGLHPANGGGGGSGGGSRDWDFDVFGGGTPVGGHH | |
| | | HHHH | |
| 495. | CH19_6-G10xI2C6-LY- | QRFVTGHFGGLYPANGGGGGSQVQLVQSGAEVKKPGASVKVSCKASGYTFTYYGISWVRQAPG | |
| | FcB-LH-156 | QGLEWMGWINPYIGKTNYAQKLQGRVIMITDTSTSTAYMELRSLRSDDTAVYYCARGSGGFDY | |
| | | WGQGTLVTVSSGGGGSGGGGSGGGGSDIVMTQTPLSLSVTPGEPASISCRSSQSLLHSNGYNY | |
| | | LDWYLQKPGQSPQLLIYLGSYRASGVPDRFSGSGSGTDFTLKISRVEAEDVGVYYCMQALQTP | |
| | | FTFGPGTKVDIKSGGGGSEVQLVESGGGLVQPGGSLKLSCAASGFTFNKYAMNWVRQAPGKGL | |
| | | EWVARIRSKYNNYATYYADSVKDRFTISRDDSKNTAYLQMNNLKTEDTAVYYCVRHGNFGNSY | |
| | | ISYWAYWGQGTLVTVSSGGGGSGGGGSGGGGSQTVVIQEPSLIVSPGGIVTLICGSSIGAVIS | |
| | | GNYPNWVQQKPGQAPRGLIGGTKFLAPGTPARFSGSLLGGKAALTLSGVQPEDEAEYYCVLWY | |
| | | SNRWVFGGGIKLTVLGGGGSQRFVIGHFGGLHPANGGGGGSGGGSRDWDFDVFGGGIPVGGHH | |
| | | HHHH | |
| 496. | CH19_4-H8xI2C6-LY-FcB- | QRFVTGHFGGLYPANGGGGGSQVQLVQSGAEVKKPGASVKVSCKASGYTFTYYGISWVRQAPG | |
| | LH-156 | QGLEWMGWINPYIGKTNYAQKLQGRVIMITDTSTSTAYMELRSLRSDDTAVYYCARGSGGFDY | |
| | | WGQGILVTVSSGGGGSGGGGSGGGGSDIVMTQTPLSLSVTPGEPASISCRSSQSLLHSVGYNY | |
| | | LDWYLQKPGQSPQLLIYLGSYRASGVPDRFSGSGSGIDFTLKISRVEAEDVGVYYCMQALQIP | |
| | | FTFGPGTKVDIKSGGGGSEVQLVESGGGLVQPGGSLKLSCAASGFTFNKYAMNWVRQAPGKGL | |
| | | EWVARIRSKYNNYATYYADSVKDRFTISRDDSKNTAYLQMNNLKTEDTAVYYCVRHGNFGNSY | |
| | | ISYWAYWGQGTLVTVSSGGGGSGGGGSGGGGSQTVVTQEPSLTVSPGGTVTLTCGSSTGAVTS | |
| | | GNYPNWVQQKPGQAPRGLIGGTKFLAPGTPARFSGSLLGGKAALTLSGVQPEDEAEYYCVLWY | |
| | | SNRWVFGGGTKLTVLGGGGSQRFVTGHFGGLHPANGGGGGSGGGSRDWDFDVFGGGTPVGGHH | |
| | | HHHH | |
| 497. | CH19_2-E4xI2C6-LY-FcB- | QRFVTGHFGGLYPANGGGGGSQVQLVQSGAEVKKPGASVKVSCKASGYTFTSYGISWVRQAPG | |
| | LH-156 | QGLEWMGWINPYIGNRNYAQKVQDRVTMTTDTSTNTAYMELSSLRSDDTAVYYCARGSGGFDY | |
| | | WGQGTLVTVSSGGGGSGGGGSGGGGSDIVMTQSPLSLPVTLGQPASISCRSSQSLLHSVGYNY | |
| | | LDWYLQKPGQSPQLLIYLGSNRASGVPDRFSGSGSGTDFTLKISRVEAEDVGVYYCMQALQTP | |
| | | FTFGPGTKLEIKSGGGGSEVQLVESGGGLVQPGGSLKLSCAASGFTFNKYAMNWVRQAPGKGL | |
| | | EWVARIRSKYNNYATYYADSVKDRFTISRDDSKNTAYLQMNNLKTEDTAVYYCVRHGNFGNSY | |
| | | ISYWAYWGQGTLVTVSSGGGGSGGGGSGGGGSQTVVTQEPSLTVSPGGTVTLTCGSSTGAVTS | |
| | | GNYPNWVQQKPGQAPRGLIGGTKFLAPGTPARFSGSLLGGKAALTLSGVQPEDEAEYYCVLWY | |
| | | SNRWVFGGGIKLTVLGGGGSQRFVIGHFGGLHPANGGGGGSGGGSRDWDFDVFGGGIPVGGHH | |
| | | HHHH | |
| 498. | CH19_6-B8xI2C6-LY-FcB- | QRFVTGHFGGLYPANGGGGGSQVQLVQSGAEVKKPGASVKVSCKASGYTFTYYGISWVRQAPG | |
| | LH-156 | QGLEWMGWINPYTGKTNYAQKLQDRVTMTTDTSTNTAYMELRSLRSDDTAVYYCARGSGGFDY | |
| | | WGQGILVTVSSGGGGSGGGGSGGGGSDIVMTQTPLSLPVTPGEPASISCRSSQSLLHSVGYNY | |
| | | LDWYLQKPGQSPQLLIYLGSNRASGVPDRFSGSGSGTDFTLKISRVEAEDVGVYYCMQALQTP | |
| | | FTFGPGTKVDIKSGGGGSEVQLVESGGGLVQPGGSLKLSCAASGFTFNKYAMNWVRQAPGKGL | |
| | | EWVARIRSKYNNYATYYADSVKDRFTISRDDSKNTAYLQMNNLKTEDTAVYYCVRHGNFGNSY | |
| | | ISYWAYWGQGTLVTVSSGGGGSGGGGSGGGGSQTVVTQEPSLTVSPGGTVTLTCGSSTGAVTS | |
| | | GNYPNWVQQKPGQAPRGLIGGTKFLAPGTPARFSGSLLGGKAALTLSGVQPEDEAEYYCVLWY | |
| | | SNRWVFGGGTKLTVLGGGGSQRFVTGHFGGLHPANGGGGGSGGGSRDWDFDVFGGGTPVGGHH | |
| | | HHHH | |
| 499. | CH19_0-B4xI2C6-LY-FcB- | QRFVTGHFGGLYPANGGGGGSQVQLVQSGAEVKKPGASVKVSCKASGYTFTTYGISWVRQAPG | |
| | LH-156 | QGLEWMGWINPYIGKTNYAQKLQGRVIMATDTSTSTAYMELRSLRSDDTAVYYCARGSGGFDY | |
| | | WGQGILVTVSSGGGGSGGGGSGGGGSDIVMTQSPLSLPVTPGEPASISCRSSQSLLHSVGYNY | |
| | | LDWYLQKPGQSPQLLTYLGSNRASGVPDRFSGSGSGTDFTLKISRVEAEDVGVYYCMQALQTP | |
| | | FTFGPGTKLEIKSGGGGSEVQLVESGGGLVQPGGSLKLSCAASGFTFNKYAMNWVRQAPGKGL | |
| | | EWVARIRSKYNNYATYYADSVKDRFTISRDDSKNTAYLQMNNLKTEDTAVYYCVRHGNFGNSY | |
| | | ISYWAYWGQGTLVTVSSGGGGSGGGGSGGGGSQTVVTQEPSLTVSPGGTVTLTCGSSTGAVTS | |
| | | GNYPNWVQQKPGQAPRGLIGGTKFLAPGTPARFSGSLLGGKAALTLSGVQPEDEAEYYCVLWY | |
| | | SNRWVFGGGTKLTVLGGGGSQRFVTGHFGGLHPANGGGGGSGGGSRDWDFDVFGGGTPVGGHH | |
| | | HHHH | |
| 500. | CH19_9-F1xI2C6-LY-FcB- | QRFVTGHFGGLYPANGGGGGSQVQLVQSGAEVKEPGASVKVSCKASGYTFTYYGISWVRQAPG | |
| | LH-156 | QGLEWMGWINPYTGNRNYAQKVQDRVTMTTDTSTNTAYMELRSLRSDDTAVYYCARGSGGFDY | |
| | | WGQGILVTVSSGGGGSGGGGSGGGGSDIVMTQSPLSLPVTPGEPASISCRSSQSLLHSVGYNY | |
| | | LDWYLQKPGQSPQLLTYLGSNRASGVPDRFSGSGSGTDFTLKISRVEAEDVGVYYCMQALQTP | |
| | | FTFGPGTKLEIKSGGGGSEVQLVESGGGLVQPGGSLKLSCAASGFTFNKYAMNWVRQAPGKGL | |
| | | EWVARIRSKYNNYATYYADSVKDRFTISRDDSKNTAYLQMNNLKTEDTAVYYCVRHGNFGNSY | |
| | | ISYWAYWGQGTLVTVSSGGGGSGGGGSGGGGSQTVVTQEPSLTVSPGGTVTLICGSSTGAVIS | |
| | | GNYPNWVQQKPGQAPRGLIGGTKFLAPGTPARFSGSLLGGKAALTLSGVQPEDEAEYYCVLWY | |
| | | SNRWVFGGGTKLTVLGGGGSQRFVTGHFGGLHPANGGGGGSGGGSRDWDFDVFGGGTPVGGHH | |
| | | HHHH | |
| 501. | CH19_4-A7xI2C6-LY-FcB- | QRFVTGHFGGLYPANGGGGGSQVQLVQSGAEVKKPGASVKVSCKASGYTFTYYGISWVRQAPG | |
| | LH-156 | QGLEWMGWINPYTGKTNYAQKLQGRVTMTTDTSTSTAYMELRSLRSDDTAVYYCARGSGGFDY | |
| | | WGQGILVTVSSGGGGSGGGGSGGGGSDIVMTQSPLSLPVTPGEPASISCRSSQSLLHSVGYNY | |
| | | LDWYLQKPGQSPQLLTYLGSNRASGVPDRFSGSGSGIDFTLKISRVEAEDVGVYYCMQALQTP | |
| | | FTFGPGTKVEIKSGGGGSEVQLVESGGGLVQPGGSLKLSCAASGFTFNKYAMNWVRQAPGKGL | |
| | | EWVARIRSKYNNYATYYADSVKDRFTISRDDSKNTAYLQMNNLKTEDTAVYYCVRHGNFGNSY | |
| | | ISYWAYWGQGTLVTVSSGGGGSGGGGSGGGGSQTVVTQEPSLTVSPGGTVTLTCGSSTGAVTS | |
| | | GNYPNWVQQKPGQAPRGLIGGTKFLAPGTPARFSGSLLGGKAALTLSGVQPEDEAEYYCVLWY | |
| | | SNRWVFGGGTKLTVLGGGGSQRFVTGHFGGLHPANGGGGGSGGGSRDWDFDVFGGGTPVGGHH | |
| | | HHHH | |
| 502. | CH19_6-E12xI2C6-LY- | QRFVTGHFGGLYPANGGGGGSQVQLVQSGAEVKKPGASVKVSCKASGYTFTSYGITWVRQAPG | |
| | FcB-LH-156 | QGLEWMGWINPYTGNRNYAQKVQGRVTMTTDTSTSTAYMELRSLRSDDTAVYYCARGSGGFDY | |
| | | WGQGTLVTVSSGGGGSGGGGSGGGGSDIVMTQSPLSLSVTPGEPASISCRSSQSLLHSVGYNY | |
| | | LDWYLQKPGQSPQLLIYLGSNRASGVPDRFSGSGSGTDFTLKISRVEAEDVGVYYCMQALQTP | |
| | | FTFGPGTKVDIKSGGGGSEVQLVESGGGLVQPGGSLKLSCAASGFTFNKYAMNWVRQAPGKGL | |
| | | EWVARIRSKYNNYATYYADSVKDRFTISRDDSKNTAYLQMNNLKTEDTAVYYCVRHGNFGNSY | |
| | | ISYWAYWGQGTLVTVSSGGGGSGGGGSGGGGSQTVVTQEPSLTVSPGGTVTLTCGSSTGAVTS | |
| | | GNYPNWVQQKPGQAPRGLIGGTKFLAPGTPARFSGSLLGGKAALTLSGVQPEDEAEYYCVLWY | |
| | | SNRWVFGGGTKLTVLGGGGSQRFVTGHFGGLHPANGGGGGSGGGSRDWDFDVFGGGTPVGGHH | |
| | | HHHH | |
| 503. | CH19_6-C12xI2C6-LY- | QRFVTGHFGGLYPANGGGGGSQVQLVQSGAEVKKPGASVKVSCKASGYTFTSYGISWVRQAPG | |
| | FcB-LH-156 | QGLEWMGWINPYIGNRNYAQKFQGRVIMITDTSTNTAYMELSSLRSEDTAVYYCARGSGGFDY | |
| | | WGQGILVTVSSGGGGSGGGGSGGGGSDIVMTQSPLSLPVTPGEPASISCRSSQSLLHSVGYNY | |
| | | LDWYLQKPGQSPQLLIYLGSNRASGVPDRFSGSGSGTDFTLKISRVEAEDVGVYYCMQALQTP | |
| | | FTFGPGTKVDIKSGGGGSEVQLVESGGGLVQPGGSLKLSCAASGFTFNKYAMNWVRQAPGKGL | |
| | | EWVARIRSKYNNYATYYADSVKDRFTISRDDSKNTAYLQMNNLKTEDTAVYYCVRHGNFGNSY | |
| | | ISYWAYWGQGTLVTVSSGGGGSGGGGSGGGGSQTVVTQEPSLTVSPGGTVTLTCGSSTGAVTS | |
| | | GNYPNWVQQKPGQAPRGLIGGTKFLAPGTPARFSGSLLGGKAALTLSGVQPEDEAEYYCVLWY | |
| | | SNRWVFGGGTKLTVLGGGGSQRFVTGHFGGLHPANGGGGGSGGGSRDWDFDVFGGGTPVGGHH | |
| | | HHHH | |
| 504. | CH19_6-A7xI2C6-LY-FcB- | QRFVTGHFGGLYPANGGGGGSQVQLVQSGAEVKKPGASVKVSCKASGYSFTSYGISWVRQAPG | |
| | LH-156 | QGLEWMGWINPYIGNRNYAQKVQGRVIMITDTSTSTAYMELRSLRSDDTAVYYCARGSGGFDY | |
| | | WGQGTLVTVSSGGGGSGGGGSGGGGSDIVMTQSPLSLPVTPGEPASISCRSSQSLLHSVGYNY | |
| | | LDWYLQKPGQSPQLLIYLGSNRASGVPDRFSGSGSGTDFTLKISRVEAEDVGVYYCMQALQTP | |
| | | FTFGPGTKVEIKSGGGGSEVQLVESGGGLVQPGGSLKLSCAASGFTFNKYAMNWVRQAPGKGL | |
| | | EWVARIRSKYNNYATYYADSVKDRFTISRDDSKNTAYLQMNNLKTEDTAVYYCVRHGNFGNSY | |
| | | ISYWAYWGQGTLVTVSSGGGGSGGGGSGGGGSQTVVIQEPSLIVSPGGIVTLICGSSTGAVIS | |
| | | GNYPNWVQQKPGQAPRGLIGGTKFLAPGTPARFSGSLLGGKAALTLSGVQPEDEAEYYCVLWY | |
| | | SNRWVFGGGTKLTVLGGGGSQRFVTGHFGGLHPANGGGGGSGGGSRDWDFDVFGGGTPVGGHH | |
| | | HHHH | |
| 505. | CH19_6-G8xI2C6-LY-FcB- | QRFVIGHFGGLYPANGGGGGSQVQLVQSGAEVKKPGASVKVSCKASGYTFTYYGISWVRQAPG | |
| | LH-156 | QGLEWMGWINPYTGKTNYAQKVQGRVTMTTDTSTSTAYMELRNLRSDDTAVYYCARGSGGFDY | |
| | | WGQGTLVTVSSGGGGSGGGGSGGGGSDIVMTQTPLSLSVTPGQPASISCRSSQSLLHSVGYNY | |
| | | LDWYLQKPGQSPQLLIYLGSNRASGVPDRFSGSGSGIDFTLKISRVEAEDVGVYYCMQALQTP | |
| | | FTFGPGTKVDIKSGGGGSEVQLVESGGGLVQPGGSLKLSCAASGFTFNKYAMNWVRQAPGKGL | |
| | | EWVARIRSKYNNYATYYADSVKDRFTISRDDSKNTAYLQMNNLKTEDTAVYYCVRHGNFGNSY | |
| | | ISYWAYWGQGTLVTVSSGGGGSGGGGSGGGGSQTVVTQEPSLTVSPGGTVTLTCGSSTGAVTS | |
| | | GNYPNWVQQKPGQAPRGLIGGTKFLAPGTPARFSGSLLGGKAALTLSGVQPEDEAEYYCVLWY | |
| | | SNRWVFGGGTKLTVLGGGGSQRFVTGHFGGLHPANGGGGGSGGGSRDWDFDVFGGGTPVGGHH | |
| | | HHHH | |
| 506. | CH19_6-F9xI2C6-LY-FcB- | QRFVTGHFGGLYPANGGGGGSQVQLVQSGAEVKKPGASVKVSCKASGYTFTYYGISWVRQAPG | |
| | LH-156 | QGLEWMGWINPYTGKTNYAQKLQGRVTMTTDTSTSTAYMELRSLRSDDTAVYYCARGSGGFDY | |
| | | WGQGILVTVSSGGGGSGGGGSGGGGSDIVMTQTPLSLSVTPGQPASISCRSSQSLLHSVGYNY | |
| | | LDWYLQKPGQSPQLLIYLGSNRASGVPDRFSGSGSGTDFTLKISRVEAEDVGVYYCMQALQTP | |
| | | FTFGPGTKVDIKSGGGGSEVQLVESGGGLVQPGGSLKLSCAASGFTFNKYAMNWVRQAPGKGL | |
| | | EWVARIRSKYNNYATYYADSVKDRFTISRDDSKNTAYLQMNNLKTEDTAVYYCVRHGNFGNSY | |
| | | ISYWAYWGQGTLVTVSSGGGGSGGGGSGGGGSQTVVTQEPSLTVSPGGTVTLTCGSSTGAVTS | |
| | | GNYPNWVQQKPGQAPRGLIGGTKFLAPGTPARFSGSLLGGKAALTLSGVQPEDEAEYYCVLWY | |
| | | SNRWVFGGGTKLIVLGGGGSQRFVTGHFGGLHPANGGGGGSGGGSRDWDFDVFGGGTPVGGHH | |
| | | HHHH | |
| 507. | CH19_0-C11xI2C6-LY- | QRFVTGHFGGLYPANGGGGGSQVQLVESGGGVVQPGRSLRLSCAASGFTFRNYAMHWVRQAPG | |
| | FcB-LH-156 | KGLEWVAVISYSGNNKYYASSVKGRFTISRDNSKNTLYLQLNSLRAEDTAVYYCAREFYYDST | |
| | | GYDYSTPGDYWGQGTLVTVSSGGGGSGGGGSGGGGSDIQMTQSPSSLSASVGDRVTITCQASQ | |
| | | DISNYLNWYQQKPGKAPKLLIYDASNLETGVPSRFSGSGSGTDFTFTISSLQPEDIATYYCQQ | |
| | | YDNLPTFGQGTRLEIKSGGGGSEVQLVESGGGLVQPGGSLKLSCAASGFTFNKYAMNWVRQAP | |
| | | GKGLEWVARIRSKYNNYATYYADSVKDRFTISRDDSKNTAYLQMNNLKTEDTAVYYCVRHGNF | |
| | | GNSYISYWAYWGQGTLVTVSSGGGGSGGGGSGGGGSQTVVTQEPSLIVSPGGIVTLICGSSIG | |
| | | AVISGNYPNWVQQKPGQAPRGLIGGTKFLAPGTPARFSGSLLGGKAALTLSGVQPEDEAEYYC | |
| | | VLWYSNRWVEGGGIKLTVLGGGGSQRFVIGHFGGLHPANGGGGGSGGGSRDWDFDVEGGGIPV | |
| | | GGHHHHHH | |
| 508. | CH19_8-F6xI2C6-LY-FcB- | QRFVTGHFGGLYPANGGGGGSQVQLVESGGGVVQPGRSLRLSCVASGFTFRNYAMHWVRQAPG | |
| | LH-156 | KGLEWVAVISYSGNNKYYASSVKGRFTISRDNSKNTLYLQLNSLRAEDTAVYYCAREFYYDST | |
| | | GYDYSTPGDYWGQGTLVTVSSGGGGSGGGGSGGGGSDIQMTQSPSSLSASVGDRVTITCRASQ | |
| | | SISSYLNWYQQKPGKAPKLLIYDASSLQSGVPSRFSGSGSGTEFILTISSLQAEDVAVYYCQQ | |
| | | YYSTPLIFGGGTKVDIKSGGGGSEVQLVESGGGLVQPGGSLKLSCAASGFTFNKYAMNWVRQA | |
| | | PGKGLEWVARIRSKYNNYATYYADSVKDRFTISRDDSKNTAYLQMNNLKTEDTAVYYCVRHGN | |
| | | FGNSYISYWAYWGQGTLVTVSSGGGGSGGGGSGGGGSQTVVTQEPSLIVSPGGIVTLICGSST | |
| | | GAVTSGNYPNWVQQKPGQAPRGLIGGTKFLAPGTPARFSGSLLGGKAALTLSGVQPEDEAEYY | |
| | | CVLWYSNRWVFGGGTKLTVLGGGGSQRFVTGHFGGLHPANGGGGGSGGGSRDWDFDVFGGGTP | |
| | | VGGHHHHHH | |
| 509. | CH19_0-G9xI2C6-LY-FcB- | QRFVTGHFGGLYPANGGGGGSQVQLVESGGGVVQPGRSLRLSCAASGFTFRNYAMHWVRQAPG | |
| | LH-156 | KGLEWVAGISYSGTNKYYASSVKGRFTISRDNSKNTLYLQLNSLRAEDTAVYYCAREFYYDST | |
| | | GYDYSTPGDYWGQGTLVTVSSGGGGSGGGGSGGGGSDIQMTQSPSSLSASVGDRVTITCQASQ | |
| | | DISNYLNWYQQKPGKAPKLLIYDASNLETGVPSRFSGSGSGTEFTLTISSLQPEDIATYYCQQ | |
| | | YDNLPLTFGGGTKVDIKSGGGGSEVQLVESGGGLVQPGGSLKLSCAASGFTFNKYAMNWVRQA | |
| | | PGKGLEWVARIRSKYNNYATYYADSVKDRFTISRDDSKNTAYLQMNNLKTEDTAVYYCVRHGN | |
| | | FGNSYISYWAYWGQGTLVTVSSGGGGSGGGGSGGGGSQTVVTQEPSLTVSPGGTVTLTCGSST | |
| | | GAVTSGNYPNWVQQKPGQAPRGLIGGTKFLAPGTPARFSGSLLGGKAALTLSGVQPEDEAEYY | |
| | | CVLWYSNRWVFGGGTKLTVLGGGGSQRFVTGHFGGLHPANGGGGGSGGGSRDWDFDVFGGGTP | |
| | | VGGHHHHHH | |
| 510. | CH19_1-E11xI2C6-LY- | QRFVTGHFGGLYPANGGGGGSQVQLVESGGGVVQPGRSLRLSCVASGFTFRNYAMHWVRQAPG | |
| | FcB-LH-156 | KGLEWVAVISYSGNNKYYASSVKGRFTISRDNSKNTLFLQLNSLRAEDTAVYYCAREFYYDST | |
| | | GYDYSTPGNYWGQGTLVTVSSGGGGSGGGGSGGGGSDIQMTQSPSSLSASVGDRVTITCQASQ | |
| | | DISNYLNWYQQKPGKAPKLLIYDASNLETGVPSRFSGSGSGTDFTFTISSLQPEDIATYYCQQ | |
| | | YVNLPLTFGGGTKLEIKSGGGGSEVQLVESGGGLVQPGGSLKLSCAASGFTFNKYAMNWVRQA | |
| | | PGKGLEWVARIRSKYNNYATYYADSVKDRFTISRDDSKNTAYLQMNNLKTEDTAVYYCVRHGN | |
| | | FGNSYISYWAYWGQGTLVTVSSGGGGSGGGGSGGGGSQTVVTQEPSLTVSPGGTVTLTCGSST | |
| | | GAVTSGNYPNWVQQKPGQAPRGLIGGTKFLAPGTPARFSGSLLGGKAALTLSGVQPEDEAEYY | |
| | | CVLWYSNRWVFGGGTKLTVLGGGGSQRFVTGHFGGLHPANGGGGGSGGGSRDWDFDVFGGGTP | |
| | | VGGHHHHHH | |
| 511. | CH19_0-F5xI2C6-LY-FcB- | QRFVTGHFGGLYPANGGGGGSQVQLVESGGGVVQPGRSLRLSCAASGFTFSSYGMQWVRQAPG | |
| | LH-156 | KGLEWVAVIWYSGSNKYYASSVKGRFTISRDNSKNTLYLQMNSLRAEDTAVYYCARDGYPIFY | |
| | | RYYGMDVWGQGTIVIVSSGGGGSGGGGSGGGGSDIQMTQSPSSLSASVGDRVTITCRASQGIS | |
| | | NYLAWYQQKPGKVPKLLIYAASTLQSGVPSRFSGSGSGTDFTLTISSLQPEDVATYYCQKYNS | |
| | | APLTFGGGTKVEIKSGGGGSEVQLVESGGGLVQPGGSLKLSCAASGFTENKYAMNWVRQAPGK | |
| | | GLEWVARIRSKYNNYATYYADSVKDRFTISRDDSKNTAYLQMNNLKTEDTAVYYCVRHGNFGN | |
| | | SYISYWAYWGQGTLVTVSSGGGGSGGGGSGGGGSQTVVTQEPSLTVSPGGTVTLTCGSSTGAV | |
| | | TSGNYPNWVQQKPGQAPRGLIGGTKFLAPGTPARFSGSLLGGKAALTLSGVQPEDEAEYYCVL | |
| | | WYSNRWVFGGGTKLTVLGGGGSQRFVTGHFGGLHPANGGGGGSGGGSRDWDFDVFGGGTPVGG | |
| | | HHHHHH | |
| 512. | CH19_1-E1xI2C6-LY-FcB- | QRFVTGHFGGLYPANGGGGGSQVQLVESGGGVVQPGRSLRLSCAASGFTFSSYGMHWVRQAPG | |
| | LH-156 | KGLEWVAVISYSGSNKYYASSVKGRFTISRDNSKNTLYLQMNSLRAEDTAVYYCARDGYPIFY | |
| | | RYYGMDVWGQGTIVIVSSGGGGSGGGGSGGGGSEIVLIQSPGILSLSPGERAILSCRASQSVS | |
| | | SSYLAWYQQKPGQAPRLLIYGASSRATGIPDRFSGSGSGTDFTLTISRLEPEDLAVYYCQQYG | |
| | | TSPLTFGGGTKLEIKSGGGGSEVQLVESGGGLVQPGGSLKLSCAASGFTFNKYAMNWVRQAPG | |
| | | KGLEWVARIRSKYNNYATYYADSVKDRFTISRDDSKNTAYLQMNNLKTEDTAVYYCVRHGNFG | |
| | | NSYISYWAYWGQGTLVTVSSGGGGSGGGGSGGGGSQTVVTQEPSLTVSPGGTVTLTCGSSTGA | |
| | | VTSGNYPNWVQQKPGQAPRGLIGGTKFLAPGTPARFSGSLLGGKAALTLSGVQPEDEAEYYCV | |
| | | LWYSNRWVFGGGTKLTVLGGGGSQRFVIGHFGGLHPANGGGGGSGGGSRDWDFDVFGGGIPVG | |
| | | GHHHHHH | |
| 513. | CH19_1-E6xI2C6-LY-FcB- | QRFVTGHFGGLYPANGGGGGSQVQLVESGGGVVQPGRSLRLSCAASGFTFSSFGMHWVRQAPG | |
| | LH-156 | KGLEWVAFIWYSGSNKYYASSVKGRVTISRDNSKNTLYLQMNSLRAEDTAVYYCARDGYPIFY | |
| | | YYYGMDVWGQGTIVIVSSGGGGSGGGGSGGGGSEIVLIQSPGILSLSPGERATLSCRASQSVS | |
| | | SSYLAWYQQKPGQAPRLLIYGASSRATGIPDRFSGSGSGTDFTLTISRLEPEDFAVYYCQQYG | |
| | | SSPFIFGPGIRLEIKSGGGGSEVQLVESGGGLVQPGGSLKLSCAASGFTFNKYAMNWVRQAPG | |
| | | KGLEWVARIRSKYNNYATYYADSVKDRFTISRDDSKNTAYLQMNNLKTEDTAVYYCVRHGNFG | |
| | | NSYISYWAYWGQGTLVTVSSGGGGSGGGGSGGGGSQTVVTQEPSLTVSPGGTVTLTCGSSTGA | |
| | | VTSGNYPNWVQQKPGQAPRGLIGGTKFLAPGTPARFSGSLLGGKAALTLSGVQPEDEAEYYCV | |
| | | LWYSNRWVEGGGTKLTVLGGGGSQRFVTGHFGGLHPANGGGGGSGGGSRDWDFDVFGGGTPVG | |
| | | GHHHHHH | |
| 514. | CH19_2G6_302_VKGxI2C6- | QRFCIGHFGGLHPCNGGGGGSQVQLVESGGGVVQPGGSLRLSCAASGFTESSYGMHWVRQAPG | |
| | CH-FcB-LH | KGLEWVAFIWYDGSNKYYADSVKGRFTISRDNSKNTLYLQMNSLRAEDTAVYYCARRAGIIGT | |
| | | IGYYYGMDVWGQGTTVTVSSGGGGSGGGGSGGGGSSYELTQPPSVSVSPGQTASITCSGDRLG | |
| | | EKYTSWYQQRPGQSPLLVIYQDTKRPSGIPERFSGSNSGNTATLTISGTQAMDEADYYCQAWE | |
| | | SSTVVFGGGIKLIVLSGGGGSEVQLVESGGGLVQPGGSLKLSCAASGFTFNKYAMNWVRQAPG | |
| | | KGLEWVARIRSKYNNYATYYADSVKDRFTISRDDSKNTAYLQMNNLKTEDTAVYYCVRHGNFG | |
| | | NSYISYWAYWGQGTLVTVSSGGGGSGGGGSGGGGSQTVVTQEPSLTVSPGGTVTLTCGSSTGA | |
| | | VTSGNYPNWVQQKPGQAPRGLIGGTKFLAPGTPARFSGSLLGGKAALTLSGVQPEDEAEYYCV | |
| | | LWYSNRWVFGGGTKLTVLGGGGSQRFVTGHFGGLHPANGHHHHHH | |
| 515. | CH19_0-E11xI2C6-CH- | QRFCTGHFGGLHPCNGGGGGSQVQLQESGPGLVKPSQTLSLTCTVSGGSISRGGYYWSWIRQH | |
| | FcB-LH | PGKGLEWIGYIFYRGRTYYNPSLKSRVTISVDTSKNQFSLKLSSVTAADTAVYYCARVNSNYG | |
| | | WFDPWGQGTLVTVSSGGGGSGGGGSGGGGSEIVLTQFPGILSLSPGERATLSCRASQSVSSSY | |
| | | LAWYQQKPGQAPRLLIYGASSRATGIPDRFSGSGSGIDFILTISRLEPEDFAVYYCQQYGSSP | |
| | | LTFGGGTKLEIKSGGGGSEVQLVESGGGLVQPGGSLKLSCAASGFTFNKYAMNWVRQAPGKGL | |
| | | EWVARIRSKYNNYATYYADSVKDRFTISRDDSKNTAYLQMNNLKTEDTAVYYCVRHGNFGNSY | |
| | | ISYWAYWGQGTLVTVSSGGGGSGGGGSGGGGSQTVVTQEPSLTVSPGGTVTLTCGSSTGAVTS | |
| | | GNYPNWVQQKPGQAPRGLIGGTKFLAPGTPARFSGSLLGGKAALTLSGVQPEDEAEYYCVLWY | |
| | | SNRWVFGGGTKLTVLGGGGSQRFVTGHFGGLHPANGHHHHHH | |
| 516. | CH19_5-G4xI2C6-CH-FcB- | QRFCTGHFGGLHPCNGGGGGSQVQLQESGPGLVKPSQTLSLTCTVSGGSISSGGYYWSWIRQH | |
| | LH | PGKGLEWIGYIFYRGRTYYNPSLKSRVTISVDTSKNQFSLKLSSVTAADTAVYYCARVYSNYG | |
| | | WFDPWGQGTLVTVSSGGGGSGGGGSGGGGSEIVLIQSPGILSLSPGERATLSCRASQSVSSSY | |
| | | LAWYQQKPGQAPRLLIYGTSNRATGIPDRFSGSGSGIDFILTISRLEPEDFAVYYCQQYGSSP | |
| | | LTFGGGTKLEIKSGGGGSEVQLVESGGGLVQPGGSLKLSCAASGFTFNKYAMNWVRQAPGKGL | |
| | | EWVARIRSKYNNYATYYADSVKDRFTISRDDSKNTAYLQMNNLKTEDTAVYYCVRHGNFGNSY | |
| | | ISYWAYWGQGTLVTVSSGGGGSGGGGSGGGGSQTVVTQEPSLTVSPGGTVTLTCGSSTGAVTS | |
| | | GNYPNWVQQKPGQAPRGLIGGTKFLAPGTPARFSGSLLGGKAALTLSGVQPEDEAEYYCVLWY | |
| | | SNRWVFGGGTKLTVLGGGGSQRFVTGHFGGLHPANGHHHHHH | |
| 517. | CH19_8-H6xI2C6-CH-FcB- | QRFCTGHFGGLHPCNGGGGGSQVQLQESGPGLVKPSQTLSLTCTVSGGSISSGGYYWSWIRQH | |
| | LH | PGKGLEWIGYIFYSGRTYYNPSLKSRVTISVDTSKNQFSLKLSSVTAADTAVYYCARVYSNYG | |
| | | WFDPWGQGTLVTVSSGGGGSGGGGSGGGGSEIVLTQSPGTLSLSPGERATLSCRASQSVSSSY | |
| | | LAWYQQKPGQAPRLLIYGASSRATGIPDRFSGSGSGIDFILTISRLEPEDFAVYYCQQYGSSP | |
| | | LTFGGGTKLEIKSGGGGSEVQLVESGGGLVQPGGSLKLSCAASGFTFNKYAMNWVRQAPGKGL | |
| | | EWVARIRSKYNNYATYYADSVKDRFTISRDDSKNTAYLQMNNLKTEDTAVYYCVRHGNFGNSY | |
| | | ISYWAYWGQGTLVTVSSGGGGSGGGGSGGGGSQTVVIQEPSLIVSPGGIVTLICGSSTGAVIS | |
| | | GNYPNWVQQKPGQAPRGLIGGTKFLAPGTPARFSGSLLGGKAALTLSGVQPEDEAEYYCVLWY | |
| | | SNRWVFGGGTKLTVLGGGGSQRFVTGHFGGLHPANGHHHHHH | |
| 518. | CH19_2-C11xI2C6-CH- | QRFCIGHFGGLHPCNGGGGGSQVQLQESGPGLVKPSQTLSLICTVSGGSISSGGYYWSWIRQH | |
| | FcB-LH | PGKGLEWIGYIFYSGRTYYNPSLKSRVTISVDTSKNQFSLKLRSVTAADTAVYYCARVYSNYG | |
| | | WFDPWGQGTLVTVSSGGGGSGGGGSGGGGSEIVLIQSPGILSLSPGERATLSCRASQSVSSSY | |
| | | LAWYQQKPGQAPRLLIYGASSRATGIPDRFSGSGSGTDFTLTISRLEPEDFAVYYCQQYGSSP | |
| | | LTFGGGTKLEIKSGGGGSEVQLVESGGGLVQPGGSLKLSCAASGFTFNKYAMNWVRQAPGKGL | |
| | | EWVARIRSKYNNYATYYADSVKDRFTISRDDSKNTAYLQMNNLKTEDTAVYYCVRHGNFGNSY | |
| | | ISYWAYWGQGTLVTVSSGGGGSGGGGSGGGGSQTVVTQEPSLTVSPGGTVTLTCGSSTGAVTS | |
| | | GNYPNWVQQKPGQAPRGLIGGTKFLAPGTPARFSGSLLGGKAALTLSGVQPEDEAEYYCVLWY | |
| | | SNRWVFGGGTKLTVLGGGGSQRFVTGHFGGLHPANGHHHHHH | |
| 519. | CH19_2-A10xI2C6-CH- | QRFCTGHFGGLHPCNGGGGGSQVQLQESGPGLVKPSQTLSLTCTVSGGSISSGGYYWSWIRQH | |
| | FcB-LH | PGKGLEWIGYIYYSGSTFYNPSLRSRVTISVDTSKNQFSLKLSSVTAADTAVYYCARDSSSSR | |
| | | ALDYWGQGTLVTVSSGGGGSGGGGSGGGGSEIVLIQSPGILSLSPGERATLSCRASQSVSSSY | |
| | | LAWYQQKPGQAPRLLIYGASSRATGIPDRFSGSGSGTDFTLTISRLEPEDFAVYYCQQYDSSP | |
| | | RTFGQGTKLEIKSGGGGSEVQLVESGGGLVQPGGSLKLSCAASGFTFNKYAMNWVRQAPGKGL | |
| | | EWVARIRSKYNNYATYYADSVKDRFTISRDDSKNTAYLQMNNLKTEDTAVYYCVRHGNFGNSY | |
| | | ISYWAYWGQGTLVTVSSGGGGSGGGGSGGGGSQTVVTQEPSLTVSPGGTVTLTCGSSTGAVTS | |
| | | GNYPNWVQQKPGQAPRGLIGGTKFLAPGTPARFSGSLLGGKAALTLSGVQPEDEAEYYCVLWY | |
| | | SNRWVFGGGTKLTVLGGGGSQRFVTGHFGGLHPANGHHHHHH | |
| 520. | CH191-D10xI2C6-CH- | QRFCTGHFGGLHPCNGGGGGSQVQLQESGPGLVKPSQTLSLTCTVSGGSISSGGYYWSWIRQH | |
| | FcB-LH | PGKGLEWIGYIYYRGRTYYNPSLKSRVTISVDTSKNQFSLKLSSVTAADTAVYYCARVYSNYG | |
| | | WFDPWGQGTLVTVSSGGGGSGGGGSGGGGSEIVLIQSPGILSLSPGERATLSCRASQSVSSSY | |
| | | LAWYQQKPGQAPRLLIYGASSRATGIPDRFSGSGSGTDFTLTISRLEPEDFAVYYCQQYGSSP | |
| | | LTFGGGTKLEIKSGGGGSEVQLVESGGGLVQPGGSLKLSCAASGFTFNKYAMNWVRQAPGKGL | |
| | | EWVARIRSKYNNYATYYADSVKDRFTISRDDSKNTAYLQMNNLKTEDTAVYYCVRHGNFGNSY | |
| | | ISYWAYWGQGTLVTVSSGGGGSGGGGSGGGGSQTVVTQEPSLTVSPGGTVTLTCGSSTGAVTS | |
| | | GNYPNWVQQKPGQAPRGLIGGTKFLAPGTPARFSGSLLGGKAALTLSGVQPEDEAEYYCVLWY | |
| | | SNRWVFGGGTKLTVLGGGGSQRFVTGHFGGLHPANGHHHHHH | |
| 521. | CH19_9-F9xI2C6-CH-FcB- | QRFCTGHFGGLHPCNGGGGGSQVQLQESGPGLVKPSETLSLTCTVSGGSISSGGYYWSWIRQH | |
| | LH | PGKGLEWIGYIFYRGRTYYNPSLKSRVTISVDTSKNQFSLKLSSVTAADTAVYYCARVYSNYG | |
| | | WFDPWGQGTLVTVSSGGGGSGGGGSGGGGSEIVLIQSPGILSLSPGERATLSCRASQSVSSSY | |
| | | LAWYQQKPGQAPRLLIYGASSRATGIPDRFSGSGSGIDFTLTISRLEPEDFAVYYCQQYGSSP | |
| | | TFGGGTKVEIKSGGGGSEVQLVESGGGLVQPGGSLKLSCAASGFTFNKYAMNWVRQAPGKGLE | |
| | | WVARIRSKYNNYATYYADSVKDRFTISRDDSKNTAYLQMNNLKTEDTAVYYCVRHGNFGNSYI | |
| | | SYWAYWGQGTLVIVSSGGGGSGGGGSGGGGSQTVVTQEPSLIVSPGGIVTLICGSSTGAVISG | |
| | | NYPNWVQQKPGQAPRGLIGGTKFLAPGTPARFSGSLLGGKAALTLSGVQPEDEAEYYCVLWYS | |
| | | NRWVFGGGTKLTVLGGGGSQRFVTGHFGGLHPANGHHHHHH | |
| 522. | CH19_1-H8xI2C6-CH-FcB- | QRFCTGHFGGLHPCNGGGGGSQVQLQESGPGLVKPSQTLSLTCTVSGGSISSGGYYWSWIRQH | |
| | LH | PGKGLEWIGYIFYRGRTYYNPSLKSRVTISVDTSKNQFSLKLSSVTAADTAVYYCARVYSNYG | |
| | | WFDPWGQGTLVTVSSGGGGSGGGGSGGGGSEIVLIQSPGILSLSPGERATLSCRASQSVSSSY | |
| | | LAWYQQKPGQAPRLLIYGASSRATGIPDRFSGSGSGTDFTLTISRLEPEDFAVYYCQQYGSSP | |
| | | LTFGGGTKVEIKSGGGGSEVQLVESGGGLVQPGGSLKLSCAASGFTFNKYAMNWVRQAPGKGL | |
| | | EWVARIRSKYNNYATYYADSVKDRFTISRDDSKNTAYLQMNNLKTEDTAVYYCVRHGNFGNSY | |
| | | ISYWAYWGQGTLVTVSSGGGGSGGGGSGGGGSQTVVIQEPSLIVSPGGIVTLICGSSTGAVIS | |
| | | GNYPNWVQQKPGQAPRGLIGGTKFLAPGTPARFSGSLLGGKAALTLSGVQPEDEAEYYCVLWY | |
| | | SNRWVFGGGTKLTVLGGGGSQRFVTGHFGGLHPANGHHHHHH | |
| 523. | CH19_1-B12xI2C6-CH- | QRFCTGHFGGLHPCNGGGGGSQVQLQESGPGLVKPSQTLSLTCTVSGGSISSGGYYWSWIRQH | |
| | FcB-LH | PGKGLEWIGYIYYRGRTYYNPSLKSRVTISVDTSKNQFSLKLSSVTAADTAVYYCARVYSNYG | |
| | | WFDPWGQGTLVTVSSGGGGSGGGGSGGGGSEIVLIQSPGILSLSPGERATLSCRASQSVSSSY | |
| | | LAWYQQKPGQAPRLLIYGASSRATGIPDRFSGSGSGTDFTLTISRLEPEDFAVYYCQQYGSSP | |
| | | TFGPGTKVEIKSGGGGSEVQLVESGGGLVQPGGSLKLSCAASGFIFNKYAMNWVRQAPGKGLE | |
| | | WVARIRSKYNNYATYYADSVKDRFTISRDDSKNTAYLQMNNLKTEDTAVYYCVRHGNFGNSYI | |
| | | SYWAYWGQGTLVTVSSGGGGSGGGGSGGGGSQTVVTQEPSLTVSPGGTVTLTCGSSTGAVTSG | |
| | | NYPNWVQQKPGQAPRGLIGGTKFLAPGTPARFSGSLLGGKAALTLSGVQPEDEAEYYCVLWYS | |
| | | NRWVFGGGTKLTVLGGGGSQRFVTGHFGGLHPANGHHHHHH | |
| 524. | CH19_0-C4xI2C6-CH-FcB- | QRFCTGHFGGLHPCNGGGGGSQVQLQESGPGLVKPSQTLSLTCTVSGGSISSGGYYWSWIRQH | |
| | LH | PGKGLEWIGYIYYRGRTYYNPSLKSRVTISVDTSKNQFSLKLSSVTAADTAVYYCARVYSNYG | |
| | | WFDPWGQGTLVTVSSGGGGSGGGGSGGGGSEIVLIQSPGILSLSPGERATLSCRASQSVSSSY | |
| | | LAWYQQKPGQAPRLLIYGASSRATGIPDRFSGSGSGTDFTLTISRLEPEDFAVYYCQQYGSSP | |
| | | TFGGGTKVEIKSGGGGSEVQLVESGGGLVQPGGSLKLSCAASGFTFNKYAMNWVRQAPGKGLE | |
| | | WVARIRSKYNNYATYYADSVKDRFTISRDDSKNTAYLQMNNLKTEDTAVYYCVRHGNFGNSYI | |
| | | SYWAYWGQGTLVTVSSGGGGSGGGGSGGGGSQTVVTQEPSLTVSPGGTVTLTCGSSTGAVTSG | |
| | | NYPNWVQQKPGQAPRGLIGGTKFLAPGTPARFSGSLLGGKAALTLSGVQPEDEAEYYCVLWYS | |
| | | NRWVFGGGTKLTVLGGGGSQRFVTGHFGGLHPANGHHHHHH | |
| 525. | CH19_3-F2xI2C6-CH-FcB- | QRFCTGHFGGLHPCNGGGGGSQVQLQESGPGLVKPSQTLSLTCTISGGSISSGGYYWSWIRQH | |
| | LH | PGKGLEWIGYIFYSGRTYYNPSLKSRVTISVDTSKNQFSLKLTSVTAADTAVYYCARVNSNYG | |
| | | WFDPWGQGTLVTVSSGGGGSGGGGSGGGGSEIVLIQSPGILSLSPGERATLSCRASQSVSSSY | |
| | | LAWYQQKPGQAPRLLIYGASSRATGIPDRFSGSGSGTDFTLTISRLEPEDFAVYYCQQYGSSP | |
| | | TFGGGTKVEIKSGGGGSEVQLVESGGGLVQPGGSLKLSCAASGFTFNKYAMNWVRQAPGKGLE | |
| | | WVARIRSKYNNYATYYADSVKDRFTISRDDSKNTAYLQMNNLKTEDTAVYYCVRHGNFGNSYI | |
| | | SYWAYWGQGTLVTVSSGGGGSGGGGSGGGGSQTVVTQEPSLTVSPGGTVTLTCGSSTGAVTSG | |
| | | NYPNWVQQKPGQAPRGLIGGTKFLAPGTPARFSGSLLGGKAALTLSGVQPEDEAEYYCVLWYS | |
| | | NRWVFGGGTKLTVLGGGGSQRFVTGHFGGLHPANGHHHHHH | |
| 526. | CH19_3-B10xI2C6-CH- | QRFCTGHFGGLHPCNGGGGGSQVQLQESGPGLVKPSQTLSLTCTVSGGSISSGGYYWSWIRQH | |
| | FcB-LH | PGKGLDWIGYIFYRGRTYYNPSLKSRVTISVDTSKNQFSLKLSSVTAADTAVYYCARVNSNYG | |
| | | WFDPWGQGTLVTVSSGGGGSGGGGSGGGGSEIVLIQSPGILSLSPGERATLSCRASQSVSSSY | |
| | | LAWYQQKPGQAPRLLIYGASSRATGIPDRFSGSGSGIDFILTISRLEPEDFAVYYCQQYGSSP | |
| | | LTFGGGTKVEIKSGGGGSEVQLVESGGGLVQPGGSLKLSCAASGFTFNKYAMNWVRQAPGKGL | |
| | | EWVARIRSKYNNYATYYADSVKDRFTISRDDSKNTAYLQMNNLKTEDTAVYYCVRHGNFGNSY | |
| | | ISYWAYWGQGTLVTVSSGGGGSGGGGSGGGGSQTVVTQEPSLTVSPGGTVTLTCGSSTGAVTS | |
| | | GNYPNWVQQKPGQAPRGLIGGTKFLAPGTPARFSGSLLGGKAALTLSGVQPEDEAEYYCVLWY | |
| | | SNRWVFGGGTKLTVLGGGGSQRFVTGHFGGLHPANGHHHHHH | |
| 527. | CH19_0-G4xI2C6-CH-FcB- | QRFCTGHFGGLHPCNGGGGGSQVQLQESGPGLVKPSQTLSLTCTVSGGSISSGGYYWSWIRQH | |
| | LH | PGKGLEWIGYIYYRGRTYYNPSLKSRVTISVDTSKNQFSLKLSSVTAADTAVYYCARVYSNYG | |
| | | WFDPWGQGTLVTVSSGGGGSGGGGSGGGGSEIVLIQSPGILSLSPGERATLSCRASQSVSSSY | |
| | | LAWYQQKPGQAPRLLIYGASTRATGIPDRFSGSGSGIDFILTISRLEPEDFAVYYCQQYGSSP | |
| | | SFGQGTKVEIKSGGGGSEVQLVESGGGLVQPGGSLKLSCAASGFTFNKYAMNWVRQAPGKGLE | |
| | | WVARIRSKYNNYATYYADSVKDRFTISRDDSKNTAYLQMNNLKTEDTAVYYCVRHGNFGNSYI | |
| | | SYWAYWGQGTLVTVSSGGGGSGGGGSGGGGSQTVVTQEPSLTVSPGGTVTLTCGSSTGAVTSG | |
| | | NYPNWVQQKPGQAPRGLIGGTKFLAPGTPARFSGSLLGGKAALTLSGVQPEDEAEYYCVLWYS | |
| | | NRWVFGGGTKLTVLGGGGSQRFVTGHFGGLHPANGHHHHHH | |
| 528. | CH19_0-H5xI2C6-CH-FcB- | QRFCTGHFGGLHPCNGGGGGSQVQLQESGPGLVRPSQTLSLTCTVSGGSISSGGYYWSWIRQH | |
| | LH | PGKGLEWIGYIYYRGRTYYNPSLKSRVTISVDTSKNQFSLKLSSVTAADTAVYYCARVYSNYG | |
| | | WFDPWGQGTLVTVSSGGGGSGGGGSGGGGSEIVLTQSPGTLSLSPGERATLSCRASQSVSSSY | |
| | | LAWYQQKPGQAPRLLIYGASSRATGIPDRFSGSGSGIDFILTISRLEPEDFAVYYCQQYDTSP | |
| | | LTFGGGTKVEIKSGGGGSEVQLVESGGGLVQPGGSLKLSCAASGFTFNKYAMNWVRQAPGKGL | |
| | | EWVARIRSKYNNYATYYADSVKDRFTISRDDSKNTAYLQMNNLKTEDTAVYYCVRHGNFGNSY | |
| | | ISYWAYWGQGTLVTVSSGGGGSGGGGSGGGGSQTVVIQEPSLIVSPGGIVTLICGSSTGAVIS | |
| | | GNYPNWVQQKPGQAPRGLIGGTKFLAPGTPARFSGSLLGGKAALTLSGVQPEDEAEYYCVLWY | |
| | | SNRWVFGGGTKLTVLGGGGSQRFVTGHFGGLHPANGHHHHHH | |
| 529. | CH19_0-B8xI2C6-CH-FcB- | QRFCIGHFGGLHPCNGGGGGSQVQLQESGPGLVKPSQTLSLICTVSGGSISSGGYYWSWIRQH | |
| | LH | PGKGLEWIGYIYYRGRTYYNPSLKSRVTISVDTSKNQFSLKLSSVTAADTAVYYCARVYSNYG | |
| | | WFDPWGQGTLVTVSSGGGGSGGGGSGGGGSEIVLIQSPGILSLSPGERATLSCRASQSVSSSY | |
| | | LAWYQQKPGQAPRLLIYGASSRATGIPDRFSGSGSGTDFTLTISRLEPEDFAVYYCQQYGSSP | |
| | | TFGGGTKVEIKSGGGGSEVQLVESGGGLVQPGGSLKLSCAASGFTFNKYAMNWVRQAPGKGLE | |
| | | WVARIRSKYNNYATYYADSVKDRFTISRDDSKNTAYLQMNNLKTEDTAVYYCVRHGNFGNSYI | |
| | | SYWAYWGQGTLVTVSSGGGGSGGGGSGGGGSQTVVTQEPSLTVSPGGTVTLTCGSSTGAVTSG | |
| | | NYPNWVQQKPGQAPRGLIGGIKFLAPGTPARFSGSLLGGKAALTLSGVQPEDEAEYYCVLWYS | |
| | | NRWVFGGGTKLTVLGGGGSQRFVTGHFGGLHPANGHHHHHH | |
| 530. | CH19_2-D9xI2C6-CH-FcB- | QRFCTGHFGGLHPCNGGGGGSQVQLQESGPGLVKPSQTLSLTCTVSGGSISSGGYYWSWIRQH | |
| | LH | PGKGLEWIGYIYYRGRTYYNPSLKSRVTISVDTSKNQFSLKLSSVTAADTAVYYCARVYSNYG | |
| | | WFDPWGQGTLVTVSSGGGGSGGGGSGGGGSEIVLIQSPGILSLSPGERATLSCRASQSVSSSY | |
| | | LAWYQQKPGQAPRLLIYGASSRATGIPDRFSGSGSGTDFTLTISRLEPEDFAVYYCQQYGSSP | |
| | | LTFGGGTKVEIKSGGGGSEVQLVESGGGLVQPGGSLKLSCAASGFTFNKYAMNWVRQAPGKGL | |
| | | EWVARIRSKYNNYATYYADSVKDRFTISRDDSKNTAYLQMNNLKTEDTAVYYCVRHGNFGNSY | |
| | | ISYWAYWGQGTLVTVSSGGGGSGGGGSGGGGSQTVVTQEPSLTVSPGGTVTLTCGSSTGAVTS | |
| | | GNYPNWVQQKPGQAPRGLIGGTKFLAPGTPARFSGSLLGGKAALTLSGVQPEDEAEYYCVLWY | |
| | | SNRWVFGGGTKLTVLGGGGSQRFVTGHFGGLHPANGHHHHHH | |
| 531. | CH19_8-H7xI2C6-CH-FcB- | QRFCTGHFGGLHPCNGGGGGSQVQLQESGPGLVKPSQTLSLTCTVSGGSISSGGYYWSWVRQH | |
| | LH | PGKGLEWIGYIFYSGRTYYNPSLKSRVIISVDTSKNQFSLKLSSVTAADTAVYYCARVYSNYG | |
| | | WFDPWGQGTLVTVSSGGGGSGGGGSGGGGSEIVLIQSPGILSLSPGERATLSCRASQSVSSSY | |
| | | LAWYQQKPGQAPRLLIYGASSRATGIPDRFSGSGSGTDFTLTISRLEPEDFAVYYCQQYGSSP | |
| | | LTFGGGTKVEIKSGGGGSEVQLVESGGGLVQPGGSLKLSCAASGFTFNKYAMNWVRQAPGKGL | |
| | | EWVARIRSKYNNYATYYADSVKDRFTISRDDSKNTAYLQMNNLKTEDTAVYYCVRHGNFGNSY | |
| | | ISYWAYWGQGTLVTVSSGGGGSGGGGSGGGGSQTVVTQEPSLTVSPGGTVTLTCGSSTGAVTS | |
| | | GNYPNWVQQKPGQAPRGLIGGTKFLAPGTPARFSGSLLGGKAALTLSGVQPEDEAEYYCVLWY | |
| | | SNRWVFGGGTKLTVLGGGGSQRFVTGHFGGLHPANGHHHHHH | |
| 532. | CH19_9-C2xI2C6-CH-FcB- | QRFCTGHFGGLHPCNGGGGGSQVQLQESGPGLVKPSQTLSLTCTVSGGSISSGGYYWSWIRQH | |
| | LH | PGKGLEWIGYIFYSGRTYYNPSLKSRVTISVDTSKNQFSLKLSSVTAADTAVYYCARVYSNYG | |
| | | WFDPWGQGTLVTVSSGGGGSGGGGSGGGGSEIVLIQSPGILSLSPGERATLSCRASQSVSSSY | |
| | | LAWYQQKPGQAPRLLIYGASSRATGIPDRFSGSGSGIDFILTISRLEPEDFAVYYCQQYGSSP | |
| | | LTFGGGTKVEIKSGGGGSEVQLVESGGGLVQPGGSLKLSCAASGFTFNKYAMNWVRQAPGKGL | |
| | | EWVARIRSKYNNYATYYADSVKDRFTISRDDSKNTAYLQMNNLKTEDTAVYYCVRHGNFGNSY | |
| | | ISYWAYWGQGTLVTVSSGGGGSGGGGSGGGGSQTVVTQEPSLTVSPGGTVTLTCGSSTGAVTS | |
| | | GNYPNWVQQKPGQAPRGLIGGTKFLAPGTPARFSGSLLGGKAALTLSGVQPEDEAEYYCVLWY | |
| | | SNRWVFGGGTKLTVLGGGGSQRFVTGHFGGLHPANGHHHHHH | |
| 533. | CH19_3-D5xI2C6-CH-FcB- | QRFCTGHFGGLHPCNGGGGGSQVQLQESGPGLVKPSQTLSLTCTVSGGSISSGGYYWSWIRQH | |
| | LH | PGKGLEWIGYIFYSGRTYYNPSLKSRVSISVDTSKNQFSLKLSSVTAADTAVYYCARVYSNYG | |
| | | WFDPWGQGTLVTVSSGGGGSGGGGSGGGGSEIVLIQSPGILSLSPGERATLSCRASQSVSSSY | |
| | | LAWYQQKPGQAPRLLIYGASSRATGIPDRFSGSGSGTDFTLTISRLEPEDFAVYYCQQYGSSP | |
| | | LTFGGGTKVEIKSGGGGSEVQLVESGGGLVQPGGSLKLSCAASGFTFNKYAMNWVRQAPGKGL | |
| | | EWVARIRSKYNNYATYYADSVKDRFTISRDDSKNTAYLQMNNLKTEDTAVYYCVRHGNFGNSY | |
| | | ISYWAYWGQGTLVTVSSGGGGSGGGGSGGGGSQTVVIQEPSLIVSPGGIVTLICGSSIGAVIS | |
| | | GNYPNWVQQKPGQAPRGLIGGTKFLAPGTPARFSGSLLGGKAALTLSGVQPEDEAEYYCVLWY | |
| | | SNRWVFGGGTKLTVLGGGGSQRFVTGHFGGLHPANGHHHHHH | |
| 534. | CH19_1-G11xI2C6-CH- | QRFCTGHFGGLHPCNGGGGGSQVQLQESGPGLVKPSETLSLTCTVSGGSVSSGGYYWSWIRQP | |
| | FcB-LH | PGKGLEWIGYIYYRGRTYYNPSLKSRVTISVDTSKNQFSLKLSSVTAADTAVYYCARVYSNYG | |
| | | WFDPWGQGTLVTVSSGGGGSGGGGSGGGGSEIVLIQSPGILSLSPGERATLSCRASQSVSSSY | |
| | | LAWYQQKPGQAPRLLIYGASSRATGIPDRFSGSGSGTDFTLTISRLEPEDFAVYYCQQYGSSP | |
| | | LIFGGGTKVEIKSGGGGSEVQLVESGGGLVQPGGSLKLSCAASGFTFNKYAMNWVRQAPGKGL | |
| | | EWVARIRSKYNNYATYYADSVKDRFTISRDDSKNTAYLQMNNLKTEDTAVYYCVRHGNFGNSY | |
| | | ISYWAYWGQGTLVTVSSGGGGSGGGGSGGGGSQTVVIQEPSLIVSPGGIVTLICGSSIGAVIS | |
| | | GNYPNWVQQKPGQAPRGLIGGTKFLAPGTPARFSGSLLGGKAALTLSGVQPEDEAEYYCVLWY | |
| | | SNRWVFGGGTKLTVLGGGGSQRFVTGHFGGLHPANGHHHHHH | |
| 535. | CH19_1-H11xI2C6-CH- | QRFCTGHFGGLHPCNGGGGGSQVQLQESGPGLVKPSQTLSLTCTVSGGSISSGGYYWSWIRQH | |
| | FcB-LH | PGKGLEWIGYIYYRGRTYYNPSLKSRVTISVDTSKNQFSLKLSSVTAADTAVYYCARVYSNYG | |
| | | WFDPWGQGTLVTVSSGGGGSGGGGSGGGGSEIVLIQSPGILSLSPGERATLSCRASQSVSSSY | |
| | | LAWYQQKPGQAPRLLIYGASSRATGIPDRFSGSGSGTDFTLTISRLEPEDFAVYYCQQYGSSP | |
| | | TFGQGTRLEIKSGGGGSEVQLVESGGGLVQPGGSLKLSCAASGFIFNKYAMNWVRQAPGKGLE | |
| | | WVARIRSKYNNYATYYADSVKDRFTISRDDSKNTAYLQMNNLKTEDTAVYYCVRHGNFGNSYI | |
| | | SYWAYWGQGTLVTVSSGGGGSGGGGSGGGGSQTVVTQEPSLTVSPGGTVTLTCGSSTGAVTSG | |
| | | NYPNWVQQKPGQAPRGLIGGTKFLAPGTPARFSGSLLGGKAALTLSGVQPEDEAEYYCVLWYS | |
| | | NRWVFGGGTKLTVLGGGGSQRFVTGHFGGLHPANGHHHHHH | |
| 536. | CH19_9-F3xI2C6-CH-FcB- | QRFCTGHFGGLHPCNGGGGGSQVQLQESGPGLVKPSQTLSLTCTVSGGSISSGGYYWSWIRQH | |
| | LH | PGKGLEWIGYIFYSGKTYYNPSLKSRVSISVDTSKNQFSLKLSSVTAADTAVYYCARVYSNYG | |
| | | WFDPWGQGTLVTVSSGGGGSGGGGSGGGGSEIVLIQSPGILSLSPGERATLSCRASQSVSSSY | |
| | | LAWYQQKPGQAPRLLIYGASSRATGIPDRFSGSGSGTDFTLTISRLEPEDFAVYYCQQYGSSP | |
| | | ITFGQGTRLEIKSGGGGSEVQLVESGGGLVQPGGSLKLSCAASGFTFNKYAMNWVRQAPGKGL | |
| | | EWVARIRSKYNNYATYYADSVKDRFTISRDDSKNTAYLQMNNLKTEDTAVYYCVRHGNFGNSY | |
| | | ISYWAYWGQGTLVTVSSGGGGSGGGGSGGGGSQTVVTQEPSLTVSPGGTVTLTCGSSTGAVTS | |
| | | GNYPNWVQQKPGQAPRGLIGGTKFLAPGTPARFSGSLLGGKAALTLSGVQPEDEAEYYCVLWY | |
| | | SNRWVFGGGTKLTVLGGGGSQRFVTGHFGGLHPANGHHHHHH | |
| 537. | CH19_2-G6xI2C6-CH-FcB- | QRFCIGHFGGLHPCNGGGGGSQVQLQESGPGLVKPSETLSLICTVSGGSISSYYWSWIRQPPG | |
| | LH | KGLEWIGYIYYSGSTNYNPSLKSRVTMSIDTSKNQFSLKLISVTAADTAVYYCARDQRRIVAA | |
| | | GGYYYGMDVWGQGTIVIVSSGGGGSGGGGSGGGGSEIVLIQSPGILSLSPGERATLSCRASQS | |
| | | VSSSYLAWYQQKPGQAPRLLIYGASTRATGIPARFSGSGSGTDFILTISRLEPEDFAVYYCQQ | |
| | | YGSSPFTFGPGTKVDIKSGGGGSEVQLVESGGGLVQPGGSLKLSCAASGFTFNKYAMNWVRQA | |
| | | PGKGLEWVARIRSKYNNYATYYADSVKDRFTISRDDSKNTAYLQMNNLKTEDTAVYYCVRHGN | |
| | | FGNSYISYWAYWGQGTLVTVSSGGGGSGGGGSGGGGSQTVVTQEPSLTVSPGGTVTLTCGSST | |
| | | GAVTSGNYPNWVQQKPGQAPRGLIGGTKFLAPGTPARFSGSLLGGKAALTLSGVQPEDEAEYY | |
| | | CVLWYSNRWVFGGGTKLTVLGGGGSQRFVTGHFGGLHPANGHHHHHH | |
| 538. | CH19_2-H7xI2C6-CH-FcB- | QRFCTGHFGGLHPCNGGGGGSQVQLQESGPGLVKPSQTLSLTCTVSGGSISSNDYYWSWIRQH | |
| | LH | PGKGLEWIGYIYYSGSTFYNPSLKSRGAISVDTSKNQFSLKLTSVTAADTAVYYCARGVYRIG | |
| | | AFDIWGQGTMVTVSSGGGGSGGGGSGGGGSDIQMTQSPSSLSASVGDRVTITCRASQSISSYL | |
| | | NWYQQKPGKAPKSLIYAASSLQSGVPSKFSGSGSGTDFILTISSLQPEDIATYYCQQSYSTPQ | |
| | | AFGGGTKVDIKSGGGGSEVQLVESGGGLVQPGGSLKLSCAASGFTFNKYAMNWVRQAPGKGLE | |
| | | WVARIRSKYNNYATYYADSVKDRFTISRDDSKNTAYLQMNNLKTEDTAVYYCVRHGNFGNSYI | |
| | | SYWAYWGQGTLVTVSSGGGGSGGGGSGGGGSQTVVTQEPSLTVSPGGTVTLTCGSSTGAVTSG | |
| | | NYPNWVQQKPGQAPRGLIGGTKFLAPGTPARFSGSLLGGKAALTLSGVQPEDEAEYYCVLWYS | |
| | | NRWVFGGGTKLTVLGGGGSQRFVTGHFGGLHPANGHHHHHH | |
| 539. | CH19_5-B3xI2C6-CH-FcB- | QRFCIGHFGGLHPCNGGGGGSQVQLVQSGAEVKKPGASVKVSCKASGYTFTYYGISWVRQAPG | |
| | LH | QGLEWMGWINPYGGETNYAQKLQGRVTMTTDTSTSTAYMELRSLRSDDTAVYYCARGSGGFDY | |
| | | WGQGTLVTVSSGGGGSGGGGSGGGGSDIVMTQTPLSLSVTPGEPASISCRSSQSLLHSNGYNY | |
| | | LDWYLQKPGQSPQLLIYLGSYRASGVPDRFSGSGSGIDFTLKISRVEAEDVGVYYCMQALQTP | |
| | | FTFGPGTKVDIKSGGGGSEVQLVESGGGLVQPGGSLKLSCAASGFTFNKYAMNWVRQAPGKGL | |
| | | EWVARIRSKYNNYATYYADSVKDRFTISRDDSKNTAYLQMNNLKTEDTAVYYCVRHGNFGNSY | |
| | | ISYWAYWGQGTLVTVSSGGGGSGGGGSGGGGSQTVVIQEPSLIVSPGGIVTLICGSSTGAVIS | |
| | | GNYPNWVQQKPGQAPRGLIGGTKFLAPGTPARFSGSLLGGKAALTLSGVQPEDEAEYYCVLWY | |
| | | SNRWVFGGGTKLTVLGGGGSQRFVTGHFGGLHPANGHHHHHH | |
| 540. | CH19_5-E10xI2C6-CH- | QRFCTGHFGGLHPCNGGGGGSQVQLVQSGAEVKKPGASVKVSCKASGYTFTYYGISWVRQAPG | |
| | FcB-LH | QGLEWMGWINPYSGATNYAQKLQGRVTMTTDTSTSTAYMELRSLRSDDTAVYYCARGSGGFDY | |
| | | WGQGTLVTVSSGGGGSGGGGSGGGGSDIVMTQTPLSLSVTPGEPASISCRSSQSLLHSNGYNY | |
| | | LDWYLQKPGQSPQLLIYLGSYRASGVPDRFSGSGSGTDFTLKISRVEAEDVGVYYCMQALQTP | |
| | | FTFGPGTKVDIKSGGGGSEVQLVESGGGLVQPGGSLKLSCAASGFTFNKYAMNWVRQAPGKGL | |
| | | EWVARIRSKYNNYATYYADSVKDRFTISRDDSKNTAYLQMNNLKTEDTAVYYCVRHGNFGNSY | |
| | | ISYWAYWGQGTLVTVSSGGGGSGGGGSGGGGSQTVVTQEPSLTVSPGGTVTLTCGSSTGAVTS | |
| | | GNYPNWVQQKPGQAPRGLIGGTKFLAPGTPARFSGSLLGGKAALTLSGVQPEDEAEYYCVLWY | |
| | | SNRWVFGGGTKLTVLGGGGSQRFVTGHFGGLHPANGHHHHHH | |
| 541. | CH19_6-G10xI2C6-CH- | QRFCTGHFGGLHPCNGGGGGSQVQLVQSGAEVKKPGASVKVSCKASGYTFTYYGISWVRQAPG | |
| | FcB-LH | QGLEWMGWINPYTGKTNYAQKLQGRVTMTTDTSTSTAYMELRSLRSDDTAVYYCARGSGGFDY | |
| | | WGQGTLVTVSSGGGGSGGGGSGGGGSDIVMTQTPLSLSVTPGEPASISCRSSQSLLHSNGYNY | |
| | | LDWYLQKPGQSPQLLIYLGSYRASGVPDRFSGSGSGTDFTLKISRVEAEDVGVYYCMQALQTP | |
| | | FTFGPGTKVDIKSGGGGSEVQLVESGGGLVQPGGSLKLSCAASGFTFNKYAMNWVRQAPGKGL | |
| | | EWVARIRSKYNNYATYYADSVKDRFTISRDDSKNTAYLQMNNLKTEDTAVYYCVRHGNFGNSY | |
| | | ISYWAYWGQGTLVTVSSGGGGSGGGGSGGGGSQTVVTQEPSLTVSPGGTVTLTCGSSTGAVTS | |
| | | GNYPNWVQQKPGQAPRGLIGGTKFLAPGTPARFSGSLLGGKAALTLSGVQPEDEAEYYCVLWY | |
| | | SNRWVFGGGTKLTVLGGGGSQRFVTGHFGGLHPANGHHHHHH | |
| 542. | CH19_4-H8xI2C6-CH-FcB- | QRFCTGHFGGLHPCNGGGGGSQVQLVQSGAEVKKPGASVKVSCKASGYTFTYYGISWVRQAPG | |
| | LH | QGLEWMGWINPYTGKTNYAQKLQGRVTMTTDTSTSTAYMELRSLRSDDTAVYYCARGSGGFDY | |
| | | WGQGTLVTVSSGGGGSGGGGSGGGGSDIVMTQTPLSLSVTPGEPASISCRSSQSLLHSVGYNY | |
| | | LDWYLQKPGQSPQLLIYLGSYRASGVPDRFSGSGSGTDFTLKISRVEAEDVGVYYCMQALQTP | |
| | | FTFGPGTKVDIKSGGGGSEVQLVESGGGLVQPGGSLKLSCAASGFTFNKYAMNWVRQAPGKGL | |
| | | EWVARIRSKYNNYATYYADSVKDRFTISRDDSKNTAYLQMNNLKTEDTAVYYCVRHGNFGNSY | |
| | | ISYWAYWGQGTLVTVSSGGGGSGGGGSGGGGSQTVVTQEPSLTVSPGGTVTLTCGSSTGAVTS | |
| | | GNYPNWVQQKPGQAPRGLIGGTKFLAPGTPARFSGSLLGGKAALTLSGVQPEDEAEYYCVLWY | |
| | | SNRWVFGGGTKLTVLGGGGSQRFVTGHFGGLHPANGHHHHHH | |
| 543. | CH19_2-E4xI2C6-CH-FcB- | QRFCTGHFGGLHPCNGGGGGSQVQLVQSGAEVKKPGASVKVSCKASGYTFTSYGISWVRQAPG | |
| | LH | QGLEWMGWINPYTGNRNYAQKVQDRVTMTTDTSTNTAYMELSSLRSDDTAVYYCARGSGGFDY | |
| | | WGQGTLVTVSSGGGGSGGGGSGGGGSDIVMTQSPLSLPVTLGQPASISCRSSQSLLHSVGYNY | |
| | | LDWYLQKPGQSPQLLIYLGSNRASGVPDRFSGSGSGIDFTLKISRVEAEDVGVYYCMQALQTP | |
| | | FTFGPGTKLEIKSGGGGSEVQLVESGGGLVQPGGSLKLSCAASGFTFNKYAMNWVRQAPGKGL | |
| | | EWVARIRSKYNNYATYYADSVKDRFTISRDDSKNTAYLQMNNLKTEDTAVYYCVRHGNFGNSY | |
| | | ISYWAYWGQGTLVTVSSGGGGSGGGGSGGGGSQTVVTQEPSLTVSPGGTVTLTCGSSTGAVTS | |
| | | GNYPNWVQQKPGQAPRGLIGGTKFLAPGTPARFSGSLLGGKAALTLSGVQPEDEAEYYCVLWY | |
| | | SNRWVFGGGTKLTVLGGGGSQRFVTGHFGGLHPANGHHHHHH | |
| 544. | CH19_6-B8xI2C6-CH-FcB- | QRFCTGHFGGLHPCNGGGGGSQVQLVQSGAEVKKPGASVKVSCKASGYTFTYYGISWVRQAPG | |
| | LH | QGLEWMGWINPYIGKTNYAQKLQDRVIMITDTSTNTAYMELRSLRSDDTAVYYCARGSGGFDY | |
| | | WGQGTLVTVSSGGGGSGGGGSGGGGSDIVMTQTPLSLPVTPGEPASISCRSSQSLLHSVGYNY | |
| | | LDWYLQKPGQSPQLLIYLGSNRASGVPDRFSGSGSGIDFTLKISRVEAEDVGVYYCMQALQTP | |
| | | FTFGPGTKVDIKSGGGGSEVQLVESGGGLVQPGGSLKLSCAASGFTFNKYAMNWVRQAPGKGL | |
| | | EWVARIRSKYNNYATYYADSVKDRFTISRDDSKNTAYLQMNNLKTEDTAVYYCVRHGNFGNSY | |
| | | ISYWAYWGQGTLVTVSSGGGGSGGGGSGGGGSQTVVIQEPSLIVSPGGIVTLICGSSIGAVIS | |
| | | GNYPNWVQQKPGQAPRGLIGGTKFLAPGTPARFSGSLLGGKAALTLSGVQPEDEAEYYCVLWY | |
| | | SNRWVFGGGTKLTVLGGGGSQRFVTGHFGGLHPANGHHHHHH | |
| 545. | CH19_0-B4xI2C6-CH-FcB- | QRFCTGHFGGLHPCNGGGGGSQVQLVQSGAEVKKPGASVKVSCKASGYTFTTYGISWVRQAPG | |
| | LH | QGLEWMGWINPYIGKTNYAQKLQGRVIMATDTSTSTAYMELRSLRSDDTAVYYCARGSGGFDY | |
| | | WGQGTLVTVSSGGGGSGGGGSGGGGSDIVMTQSPLSLPVTPGEPASISCRSSQSLLHSVGYNY | |
| | | LDWYLQKPGQSPQLLIYLGSNRASGVPDRFSGSGSGTDFTLKISRVEAEDVGVYYCMQALQTP | |
| | | FTFGPGTKLEIKSGGGGSEVQLVESGGGLVQPGGSLKLSCAASGFTFNKYAMNWVRQAPGKGL | |
| | | EWVARIRSKYNNYATYYADSVKDRFTISRDDSKNTAYLQMNNLKTEDTAVYYCVRHGNFGNSY | |
| | | ISYWAYWGQGTLVTVSSGGGGSGGGGSGGGGSQTVVIQEPSLIVSPGGIVTLICGSSIGAVIS | |
| | | GNYPNWVQQKPGQAPRGLIGGTKFLAPGTPARFSGSLLGGKAALTLSGVQPEDEAEYYCVLWY | |
| | | SNRWVFGGGTKLTVLGGGGSQRFVTGHFGGLHPANGHHHHHH | |
| 546. | CH19_9-F1xI2C6-CH-FcB- | QRFCTGHFGGLHPCNGGGGGSQVQLVQSGAEVKEPGASVKVSCKASGYTFTYYGISWVRQAPG | |
| | LH | QGLEWMGWINPYTGNRNYAQKVQDRVTMTTDTSTNTAYMELRSLRSDDTAVYYCARGSGGFDY | |
| | | WGQGTLVTVSSGGGGSGGGGSGGGGSDIVMTQSPLSLPVTPGEPASISCRSSQSLLHSVGYNY | |
| | | LDWYLQKPGQSPQLLIYLGSNRASGVPDRFSGSGSGIDFTLKISRVEAEDVGVYYCMQALQIP | |
| | | FTFGPGTKLEIKSGGGGSEVQLVESGGGLVQPGGSLKLSCAASGFTFNKYAMNWVRQAPGKGL | |
| | | EWVARIRSKYNNYATYYADSVKDRFTISRDDSKNTAYLQMNNLKTEDTAVYYCVRHGNFGNSY | |
| | | ISYWAYWGQGTLVTVSSGGGGSGGGGSGGGGSQTVVTQEPSLTVSPGGTVTLTCGSSTGAVTS | |
| | | GNYPNWVQQKPGQAPRGLIGGTKFLAPGTPARFSGSLLGGKAALTLSGVQPEDEAEYYCVLWY | |
| | | SNRWVFGGGTKLTVLGGGGSQRFVTGHFGGLHPANGHHHHHH | |
| 547. | CH19_4-A7xI2C6-CH-FcB- | QRFCTGHFGGLHPCNGGGGGSQVQLVQSGAEVKKPGASVKVSCKASGYTFTYYGISWVRQAPG | |
| | LH | QGLEWMGWINPYTGKTNYAQKLQGRVTMTTDTSTSTAYMELRSLRSDDTAVYYCARGSGGFDY | |
| | | WGQGTLVTVSSGGGGSGGGGSGGGGSDIVMTQSPLSLPVTPGEPASISCRSSQSLLHSVGYNY | |
| | | LDWYLQKPGQSPQLLIYLGSNRASGVPDRFSGSGSGTDFTLKISRVEAEDVGVYYCMQALQTP | |
| | | FTFGPGTKVEIKSGGGGSEVQLVESGGGLVQPGGSLKLSCAASGFTFNKYAMNWVRQAPGKGL | |
| | | EWVARIRSKYNNYATYYADSVKDRFTISRDDSKNTAYLQMNNLKTEDTAVYYCVRHGNFGNSY | |
| | | ISYWAYWGQGTLVTVSSGGGGSGGGGSGGGGSQTVVTQEPSLTVSPGGTVTLTCGSSTGAVTS | |
| | | GNYPNWVQQKPGQAPRGLIGGTKFLAPGTPARFSGSLLGGKAALTLSGVQPEDEAEYYCVLWY | |
| | | SNRWVFGGGTKLTVLGGGGSQRFVTGHFGGLHPANGHHHHHH | |
| 548. | CH19_6-E12xI2C6-CH- | QRFCIGHFGGLHPCNGGGGGSQVQLVQSGAEVKKPGASVKVSCKASGYTFTSYGITWVRQAPG | |
| | FcB-LH | QGLEWMGWINPYTGNRNYAQKVQGRVTMTTDTSTSTAYMELRSLRSDDTAVYYCARGSGGFDY | |
| | | WGQGILVTVSSGGGGSGGGGSGGGGSDIVMTQSPLSLSVTPGEPASISCRSSQSLLHSVGYNY | |
| | | LDWYLQKPGQSPQLLIYLGSNRASGVPDRFSGSGSGIDFTLKISRVEAEDVGVYYCMQALQIP | |
| | | FTFGPGTKVDIKSGGGGSEVQLVESGGGLVQPGGSLKLSCAASGFTFNKYAMNWVRQAPGKGL | |
| | | EWVARIRSKYNNYATYYADSVKDRFTISRDDSKNTAYLQMNNLKTEDTAVYYCVRHGNFGNSY | |
| | | ISYWAYWGQGTLVTVSSGGGGSGGGGSGGGGSQTVVTQEPSLTVSPGGTVTLTCGSSTGAVTS | |
| | | GNYPNWVQQKPGQAPRGLIGGTKFLAPGTPARFSGSLLGGKAALTLSGVQPEDEAEYYCVLWY | |
| | | SNRWVFGGGTKLTVLGGGGSQRFVTGHFGGLHPANGHHHHHH | |
| 549. | CH19_6-C12xI2C6-CH- | QRFCTGHFGGLHPCNGGGGGSQVQLVQSGAEVKKPGASVKVSCKASGYTFTSYGISWVRQAPG | |
| | FcB-LH | QGLEWMGWINPYIGNRNYAQKFQGRVIMITDTSTNTAYMELSSLRSEDTAVYYCARGSGGFDY | |
| | | WGQGILVTVSSGGGGSGGGGSGGGGSDIVMTQSPLSLPVTPGEPASISCRSSQSLLHSVGYNY | |
| | | LDWYLQKPGQSPQLLIYLGSNRASGVPDRFSGSGSGIDFTLKISRVEAEDVGVYYCMQALQIP | |
| | | FTFGPGTKVDIKSGGGGSEVQLVESGGGLVQPGGSLKLSCAASGFTFNKYAMNWVRQAPGKGL | |
| | | EWVARIRSKYNNYATYYADSVKDRFTISRDDSKNTAYLQMNNLKTEDTAVYYCVRHGNFGNSY | |
| | | ISYWAYWGQGTLVTVSSGGGGSGGGGSGGGGSQTVVTQEPSLTVSPGGTVTLTCGSSTGAVTS | |
| | | GNYPNWVQQKPGQAPRGLIGGTKFLAPGTPARFSGSLLGGKAALTLSGVQPEDEAEYYCVLWY | |
| | | SNRWVFGGGTKLTVLGGGGSQRFVTGHFGGLHPANGHHHHHH | |
| 550. | CH19_6-A7xI2C6-CH-FcB- | QRFCIGHFGGLHPCNGGGGGSQVQLVQSGAEVKKPGASVKVSCKASGYSFTSYGISWVRQAPG | |
| | LH | QGLEWMGWINPYTGNRNYAQKVQGRVTMTTDTSTSTAYMELRSLRSDDTAVYYCARGSGGFDY | |
| | | WGQGTLVTVSSGGGGSGGGGSGGGGSDIVMTQSPLSLPVTPGEPASISCRSSQSLLHSVGYNY | |
| | | LDWYLQKPGQSPQLLIYLGSNRASGVPDRFSGSGSGIDFTLKISRVEAEDVGVYYCMQALQIP | |
| | | FTFGPGTKVEIKSGGGGSEVQLVESGGGLVQPGGSLKLSCAASGFTFNKYAMNWVRQAPGKGL | |
| | | EWVARIRSKYNNYATYYADSVKDRFTISRDDSKNTAYLQMNNLKTEDTAVYYCVRHGNFGNSY | |
| | | ISYWAYWGQGTLVTVSSGGGGSGGGGSGGGGSQTVVIQEPSLIVSPGGIVTLICGSSIGAVIS | |
| | | GNYPNWVQQKPGQAPRGLIGGTKFLAPGTPARFSGSLLGGKAALTLSGVQPEDEAEYYCVLWY | |
| | | SNRWVFGGGTKLTVLGGGGSQRFVTGHFGGLHPANGHHHHHH | |
| 551. | CH19_6-G8xI2C6-CH-FcB- | QRFCTGHFGGLHPCNGGGGGSQVQLVQSGAEVKKPGASVKVSCKASGYTFTYYGISWVRQAPG | |
| | LH | QGLEWMGWINPYTGKTNYAQKVQGRVTMTTDTSTSTAYMELRNLRSDDTAVYYCARGSGGFDY | |
| | | WGQGTLVTVSSGGGGSGGGGSGGGGSDIVMTQTPLSLSVTPGQPASISCRSSQSLLHSVGYNY | |
| | | LDWYLQKPGQSPQLLIYLGSNRASGVPDRFSGSGSGTDFTLKISRVEAEDVGVYYCMQALQTP | |
| | | FTFGPGTKVDIKSGGGGSEVQLVESGGGLVQPGGSLKLSCAASGFTFNKYAMNWVRQAPGKGL | |
| | | EWVARIRSKYNNYATYYADSVKDRFTISRDDSKNTAYLQMNNLKTEDTAVYYCVRHGNFGNSY | |
| | | ISYWAYWGQGTLVTVSSGGGGSGGGGSGGGGSQTVVTQEPSLTVSPGGTVTLTCGSSTGAVTS | |
| | | GNYPNWVQQKPGQAPRGLIGGTKFLAPGTPARFSGSLLGGKAALTLSGVQPEDEAEYYCVLWY | |
| | | SNRWVFGGGTKLTVLGGGGSQRFVTGHFGGLHPANGHHHHHH | |
| 552. | CH19_6-F9xI2C6-CH-FcB- | QRFCTGHFGGLHPCNGGGGGSQVQLVQSGAEVKKPGASVKVSCKASGYTFTYYGISWVRQAPG | |
| | LH | QGLEWMGWINPYTGKTNYAQKLQGRVTMTTDTSTSTAYMELRSLRSDDTAVYYCARGSGGFDY | |
| | | WGQGTLVTVSSGGGGSGGGGSGGGGSDIVMTQTPLSLSVTPGQPASISCRSSQSLLHSVGYNY | |
| | | LDWYLQKPGQSPQLLIYLGSNRASGVPDRFSGSGSGTDFTLKISRVEAEDVGVYYCMQALQTP | |
| | | FTFGPGTKVDIKSGGGGSEVQLVESGGGLVQPGGSLKLSCAASGFTFNKYAMNWVRQAPGKGL | |
| | | EWVARIRSKYNNYATYYADSVKDRFTISRDDSKNTAYLQMNNLKTEDTAVYYCVRHGNFGNSY | |
| | | ISYWAYWGQGTLVTVSSGGGGSGGGGSGGGGSQTVVTQEPSLTVSPGGTVTLTCGSSTGAVTS | |
| | | GNYPNWVQQKPGQAPRGLIGGTKFLAPGTPARFSGSLLGGKAALTLSGVQPEDEAEYYCVLWY | |
| | | SNRWVFGGGTKLTVLGGGGSQRFVTGHFGGLHPANGHHHHHH | |
| 553. | CH19_0-C11xI2C6-CH- | QRFCTGHFGGLHPCNGGGGGSQVQLVESGGGVVQPGRSLRLSCAASGFTFRNYAMHWVRQAPG | |
| | FcB-LH | KGLEWVAVISYSGNNKYYASSVKGRFTISRDNSKNTLYLQLNSLRAEDTAVYYCAREFYYDST | |
| | | GYDYSTPGDYWGQGTLVTVSSGGGGSGGGGSGGGGSDIQMTQSPSSLSASVGDRVTITCQASQ | |
| | | DISNYLNWYQQKPGKAPKLLIYDASNLETGVPSRFSGSGSGTDFTFTISSLQPEDIATYYCQQ | |
| | | YDNLPTFGQGTRLEIKSGGGGSEVQLVESGGGLVQPGGSLKLSCAASGFTFNKYAMNWVRQAP | |
| | | GKGLEWVARIRSKYNNYATYYADSVKDRFTISRDDSKNTAYLQMNNLKTEDTAVYYCVRHGNF | |
| | | GNSYISYWAYWGQGTLVTVSSGGGGSGGGGSGGGGSQTVVTQEPSLTVSPGGTVTLTCGSSTG | |
| | | AVTSGNYPNWVQQKPGQAPRGLIGGTKFLAPGTPARFSGSLLGGKAALTLSGVQPEDEAEYYC | |
| | | VLWYSNRWVFGGGTKLTVLGGGGSQRFVTGHFGGLHPANGHHHHHH | |
| 554. | CH19_8-F6xI2C6-CH-FcB- | QRFCTGHFGGLHPCNGGGGGSQVQLVESGGGVVQPGRSLRLSCVASGFTFRNYAMHWVRQAPG | |
| | LH | KGLEWVAVISYSGNNKYYASSVKGRFTISRDNSKNTLYLQLNSLRAEDTAVYYCAREFYYDST | |
| | | GYDYSTPGDYWGQGTLVTVSSGGGGSGGGGSGGGGSDIQMTQSPSSLSASVGDRVTITCRASQ | |
| | | SISSYLNWYQQKPGKAPKLLIYDASSLQSGVPSRFSGSGSGTEFILTISSLQAEDVAVYYCQQ | |
| | | YYSTPLIFGGGTKVDIKSGGGGSEVQLVESGGGLVQPGGSLKLSCAASGFTFNKYAMNWVRQA | |
| | | PGKGLEWVARIRSKYNNYATYYADSVKDRFTISRDDSKNTAYLQMNNLKTEDTAVYYCVRHGN | |
| | | FGNSYISYWAYWGQGTLVTVSSGGGGSGGGGSGGGGSQTVVTQEPSLTVSPGGTVTLTCGSST | |
| | | GAVTSGNYPNWVQQKPGQAPRGLIGGTKFLAPGTPARFSGSLLGGKAALTLSGVQPEDEAEYY | |
| | | CVLWYSNRWVFGGGTKLTVLGGGGSQRFVTGHFGGLHPANGHHHHHH | |
| 555. | CH19_0-G9xI2C6-CH-FcB- | QRFCTGHFGGLHPCNGGGGGSQVQLVESGGGVVQPGRSLRLSCAASGFTFRNYAMHWVRQAPG | |
| | LH | KGLEWVAGISYSGINKYYASSVKGRFTISRDNSKNTLYLQLNSLRAEDTAVYYCAREFYYDST | |
| | | GYDYSTPGDYWGQGTLVTVSSGGGGSGGGGSGGGGSDIQMTQSPSSLSASVGDRVTITCQASQ | |
| | | DISNYLNWYQQKPGKAPKLLIYDASNLETGVPSRFSGSGSGTEFTLTISSLQPEDIATYYCQQ | |
| | | YDNLPLIFGGGTKVDIKSGGGGSEVQLVESGGGLVQPGGSLKLSCAASGFTFNKYAMNWVRQA | |
| | | PGKGLEWVARIRSKYNNYATYYADSVKDRFTISRDDSKNTAYLQMNNLKTEDTAVYYCVRHGN | |
| | | FGNSYISYWAYWGQGTLVIVSSGGGGSGGGGSGGGGSQTVVIQEPSLIVSPGGIVTLICGSST | |
| | | GAVTSGNYPNWVQQKPGQAPRGLIGGTKFLAPGTPARFSGSLLGGKAALTLSGVQPEDEAEYY | |
| | | CVLWYSNRWVFGGGTKLTVLGGGGSQRFVTGHFGGLHPANGHHHHHH | |
| 556. | CH19_1-E11xI2C6-CH- | QRFCIGHFGGLHPCNGGGGGSQVQLVESGGGVVQPGRSLRLSCVASGFTERNYAMHWVRQAPG | |
| | FcB-LH | KGLEWVAVISYSGNNKYYASSVKGRFTISRDNSKNTLFLQLNSLRAEDTAVYYCAREFYYDST | |
| | | GYDYSTPGNYWGQGTLVTVSSGGGGSGGGGSGGGGSDIQMTQSPSSLSASVGDRVTITCQASQ | |
| | | DISNYLNWYQQKPGKAPKLLIYDASNLETGVPSRFSGSGSGTDFTFTISSLQPEDIATYYCQQ | |
| | | YVNLPLTFGGGTKLEIKSGGGGSEVQLVESGGGLVQPGGSLKLSCAASGFTFNKYAMNWVRQA | |
| | | PGKGLEWVARIRSKYNNYATYYADSVKDRFTISRDDSKNTAYLQMNNLKTEDTAVYYCVRHGN | |
| | | FGNSYISYWAYWGQGTLVIVSSGGGGSGGGGSGGGGSQTVVIQEPSLIVSPGGIVTLICGSST | |
| | | GAVTSGNYPNWVQQKPGQAPRGLIGGTKFLAPGTPARFSGSLLGGKAALTLSGVQPEDEAEYY | |
| | | CVLWYSNRWVFGGGTKLTVLGGGGSQRFVTGHFGGLHPANGHHHHHH | |
| 557. | CH19_0-F5xI2C6-CH-FcB- | QRFCIGHFGGLHPCNGGGGGSQVQLVESGGGVVQPGRSLRLSCAASGFTESSYGMQWVRQAPG | |
| | LH | KGLEWVAVIWYSGSNKYYASSVKGRFTISRDNSKNTLYLQMNSLRAEDTAVYYCARDGYPIFY | |
| | | RYYGMDVWGQGTTVTVSSGGGGSGGGGSGGGGSDIQMTQSPSSLSASVGDRVTITCRASQGIS | |
| | | NYLAWYQQKPGKVPKLLIYAASTLQSGVPSRFSGSGSGTDFTLTISSLQPEDVATYYCQKYNS | |
| | | APLTFGGGTKVEIKSGGGGSEVQLVESGGGLVQPGGSLKLSCAASGFTFNKYAMNWVRQAPGK | |
| | | GLEWVARIRSKYNNYATYYADSVKDRFTISRDDSKNTAYLQMNNLKTEDTAVYYCVRHGNFGN | |
| | | SYISYWAYWGQGTLVTVSSGGGGSGGGGSGGGGSQTVVTQEPSLTVSPGGTVTLTCGSSTGAV | |
| | | TSGNYPNWVQQKPGQAPRGLIGGTKFLAPGTPARFSGSLLGGKAALTLSGVQPEDEAEYYCVL | |
| | | WYSNRWVFGGGTKLTVLGGGGSQRFVTGHFGGLHPANGHHHHHH | |
| 558. | CH19_1-E1xI2C6-CH-FcB- | QRFCIGHFGGLHPCNGGGGGSQVQLVESGGGVVQPGRSLRLSCAASGFTESSYGMHWVRQAPG | |
| | LH | KGLEWVAVISYSGSNKYYASSVKGRFTISRDNSKNTLYLQMNSLRAEDTAVYYCARDGYPIFY | |
| | | RYYGMDVWGQGTTVTVSSGGGGSGGGGSGGGGSEIVLTQSPGTLSLSPGERATLSCRASQSVS | |
| | | SSYLAWYQQKPGQAPRLLIYGASSRATGIPDRFSGSGSGTDFTLTISRLEPEDLAVYYCQQYG | |
| | | TSPLTFGGGTKLEIKSGGGGSEVQLVESGGGLVQPGGSLKLSCAASGFTFNKYAMNWVRQAPG | |
| | | KGLEWVARIRSKYNNYATYYADSVKDRFTISRDDSKNTAYLQMNNLKTEDTAVYYCVRHGNFG | |
| | | NSYISYWAYWGQGTLVTVSSGGGGSGGGGSGGGGSQTVVTQEPSLTVSPGGTVTLTCGSSTGA | |
| | | VTSGNYPNWVQQKPGQAPRGLIGGTKFLAPGTPARFSGSLLGGKAALTLSGVQPEDEAEYYCV | |
| | | LWYSNRWVFGGGTKLTVLGGGGSQRFVTGHFGGLHPANGHHHHHH | |
| 559. | CH19_1-E6xI2C6-CH-FcB- | QRFCIGHFGGLHPCNGGGGGSQVQLVESGGGVVQPGRSLRLSCAASGFTFSSFGMHWVRQAPG | |
| | LH | KGLEWVAFIWYSGSNKYYASSVKGRVTISRDNSKNTLYLQMNSLRAEDTAVYYCARDGYPIFY | |
| | | YYYGMDVWGQGTIVIVSSGGGGSGGGGSGGGGSEIVLIQSPGILSLSPGERAILSCRASQSVS | |
| | | SSYLAWYQQKPGQAPRLLIYGASSRATGIPDRFSGSGSGTDFTLTISRLEPEDFAVYYCQQYG | |
| | | SSPFTFGPGTRLEIKSGGGGSEVQLVESGGGLVQPGGSLKLSCAASGFTFNKYAMNWVRQAPG | |
| | | KGLEWVARIRSKYNNYATYYADSVKDRFTISRDDSKNTAYLQMNNLKTEDTAVYYCVRHGNFG | |
| | | NSYISYWAYWGQGTLVTVSSGGGGSGGGGSGGGGSQTVVTQEPSLTVSPGGTVTLTCGSSTGA | |
| | | VTSGNYPNWVQQKPGQAPRGLIGGTKFLAPGTPARFSGSLLGGKAALTLSGVQPEDEAEYYCV | |
| | | LWYSNRWVEGGGIKLTVLGGGGSQRFVTGHFGGLHPANGHHHHHH | |
| 560. | CH19_2G6_302_VKGxI2C6- | QRFCTGHFGGLHPCNGGGGGSQVQLVESGGGVVQPGGSLRLSCAASGFTFSSYGMHWVRQAPG | |
| | CH-FcB-LY | KGLEWVAFIWYDGSNKYYADSVKGRFTISRDNSKNTLYLQMNSLRAEDTAVYYCARRAGIIGT | |
| | | IGYYYGMDVWGQGTTVTVSSGGGGSGGGGSGGGGSSYELTQPPSVSVSPGQTASITCSGDRLG | |
| | | EKYTSWYQQRPGQSPLLVIYQDTKRPSGIPERFSGSNSGNTATLTISGTQAMDEADYYCQAWE | |
| | | SSTVVFGGGTKLIVLSGGGGSEVQLVESGGGLVQPGGSLKLSCAASGFTENKYAMNWVRQAPG | |
| | | KGLEWVARIRSKYNNYATYYADSVKDRFTISRDDSKNTAYLQMNNLKTEDTAVYYCVRHGNFG | |
| | | NSYISYWAYWGQGTLVTVSSGGGGSGGGGSGGGGSQTVVTQEPSLTVSPGGTVTLTCGSSTGA | |
| | | VTSGNYPNWVQQKPGQAPRGLIGGTKFLAPGTPARFSGSLLGGKAALTLSGVQPEDEAEYYCV | |
| | | LWYSNRWVFGGGTKLTVLGGGGSQRFVTGHFGGLYPANGHHHHHH | |
| 561. | CH19_0-E11xI2C6-CH- | QRFCTGHFGGLHPCNGGGGGSQVQLQESGPGLVKPSQTLSLTCTVSGGSISRGGYYWSWIRQH | |
| | FcB-LY | PGKGLEWIGYIFYRGRTYYNPSLKSRVTISVDTSKNQFSLKLSSVTAADTAVYYCARVNSNYG | |
| | | WFDPWGQGTLVTVSSGGGGSGGGGSGGGGSEIVLTQFPGTLSLSPGERATLSCRASQSVSSSY | |
| | | LAWYQQKPGQAPRLLIYGASSRATGIPDRFSGSGSGIDFILTISRLEPEDFAVYYCQQYGSSP | |
| | | LTFGGGTKLEIKSGGGGSEVQLVESGGGLVQPGGSLKLSCAASGFTFNKYAMNWVRQAPGKGL | |
| | | EWVARIRSKYNNYATYYADSVKDRFTISRDDSKNTAYLQMNNLKTEDTAVYYOVRHGNFGNSY | |
| | | ISYWAYWGQGTLVTVSSGGGGSGGGGSGGGGSQTVVIQEPSLIVSPGGIVTLICGSSTGAVTS | |
| | | GNYPNWVQQKPGQAPRGLIGGTKFLAPGTPARFSGSLLGGKAALTLSGVQPEDEAEYYCVLWY | |
| | | SNRWVFGGGTKLTVLGGGGSQRFVTGHFGGLYPANGHHHHHH | |
| 562. | CH19_5-G4xI2C6-CH-FcB- | QRFCIGHFGGLHPCNGGGGGSQVQLQESGPGLVKPSQTLSLICTVSGGSISSGGYYWSWIRQH | |
| | LY | PGKGLEWIGYIFYRGRTYYNPSLKSRVTISVDTSKNQFSLKLSSVTAADTAVYYCARVYSNYG | |
| | | WFDPWGQGTLVTVSSGGGGSGGGGSGGGGSEIVLTQSPGILSLSPGERATLSCRASQSVSSSY | |
| | | LAWYQQKPGQAPRLLIYGTSNRATGIPDRFSGSGSGTDFTLTISRLEPEDFAVYYCQQYGSSP | |
| | | LTFGGGTKLEIKSGGGGSEVQLVESGGGLVQPGGSLKLSCAASGFTFNKYAMNWVRQAPGKGL | |
| | | EWVARIRSKYNNYATYYADSVKDRFTISRDDSKNTAYLQMNNLKTEDTAVYYOVRHGNFGNSY | |
| | | ISYWAYWGQGTLVTVSSGGGGSGGGGSGGGGSQTVVTQEPSLTVSPGGTVTLTCGSSTGAVTS | |
| | | GNYPNWVQQKPGQAPRGLIGGTKFLAPGTPARFSGSLLGGKAALTLSGVQPEDEAEYYCVLWY | |
| | | SNRWVFGGGTKLTVLGGGGSQRFVTGHFGGLYPANGHHHHHH | |
| 563. | CH19_8-H6xI2C6-CH-FcB- | QRFCIGHFGGLHPCNGGGGGSQVQLQESGPGLVKPSQTLSLICTVSGGSISSGGYYWSWIRQH | |
| | LY | PGKGLEWIGYIFYSGRTYYNPSLKSRVTISVDTSKNQFSLKLSSVTAADTAVYYCARVYSNYG | |
| | | WFDPWGQGTLVTVSSGGGGSGGGGSGGGGSEIVLIQSPGILSLSPGERATLSCRASQSVSSSY | |
| | | LAWYQQKPGQAPRLLIYGASSRATGIPDRFSGSGSGTDFTLTISRLEPEDFAVYYCQQYGSSP | |
| | | LTFGGGTKLEIKSGGGGSEVQLVESGGGLVQPGGSLKLSCAASGFTFNKYAMNWVRQAPGKGL | |
| | | EWVARIRSKYNNYATYYADSVKDRFTISRDDSKNTAYLQMNNLKTEDTAVYYCVRHGNFGNSY | |
| | | ISYWAYWGQGTLVTVSSGGGGSGGGGSGGGGSQTVVTQEPSLTVSPGGTVTLTCGSSTGAVTS | |
| | | GNYPNWVQQKPGQAPRGLIGGTKFLAPGTPARFSGSLLGGKAALTLSGVQPEDEAEYYCVLWY | |
| | | SNRWVFGGGTKLTVLGGGGSQRFVTGHFGGLYPANGHHHHHH | |
| 564. | CH19_2-C11xI2C6-CH- | QRFCTGHFGGLHPCNGGGGGSQVQLQESGPGLVKPSQTLSLTCTVSGGSISSGGYYWSWIRQH | |
| | FcB-LY | PGKGLEWIGYIFYSGRTYYNPSLKSRVTISVDTSKNQFSLKLRSVTAADTAVYYCARVYSNYG | |
| | | WFDPWGQGTLVTVSSGGGGSGGGGSGGGGSEIVLIQSPGILSLSPGERATLSCRASQSVSSSY | |
| | | LAWYQQKPGQAPRLLIYGASSRATGIPDRFSGSGSGTDFTLTISRLEPEDFAVYYCQQYGSSP | |
| | | LTFGGGTKLEIKSGGGGSEVQLVESGGGLVQPGGSLKLSCAASGFTFNKYAMNWVRQAPGKGL | |
| | | EWVARIRSKYNNYATYYADSVKDRFTISRDDSKNTAYLQMNNLKTEDTAVYYCVRHGNFGNSY | |
| | | ISYWAYWGQGTLVTVSSGGGGSGGGGSGGGGSQTVVTQEPSLTVSPGGTVTLTCGSSTGAVTS | |
| | | GNYPNWVQQKPGQAPRGLIGGTKFLAPGTPARFSGSLLGGKAALTLSGVQPEDEAEYYCVLWY | |
| | | SNRWVFGGGTKLTVLGGGGSQRFVTGHFGGLYPANGHHHHHH | |
| 565. | CH19_2-A10xI2C6-CH- | QRFCTGHFGGLHPCNGGGGGSQVQLQESGPGLVKPSQTLSLTCTVSGGSISSGGYYWSWIRQH | |
| | FcB-LY | PGKGLEWIGYIYYSGSTFYNPSLRSRVTISVDTSKNQFSLKLSSVTAADTAVYYCARDSSSSR | |
| | | ALDYWGQGTLVTVSSGGGGSGGGGSGGGGSEIVLIQSPGILSLSPGERATLSCRASQSVSSSY | |
| | | LAWYQQKPGQAPRLLIYGASSRATGIPDRFSGSGSGIDFTLTISRLEPEDFAVYYCQQYDSSP | |
| | | RTFGQGTKLEIKSGGGGSEVQLVESGGGLVQPGGSLKLSCAASGFTFNKYAMNWVRQAPGKGL | |
| | | EWVARIRSKYNNYATYYADSVKDRFTISRDDSKNTAYLQMNNLKTEDTAVYYCVRHGNFGNSY | |
| | | ISYWAYWGQGTLVTVSSGGGGSGGGGSGGGGSQTVVTQEPSLTVSPGGTVTLTCGSSTGAVTS | |
| | | GNYPNWVQQKPGQAPRGLIGGTKFLAPGTPARFSGSLLGGKAALTLSGVQPEDEAEYYCVLWY | |
| | | SNRWVFGGGTKLTVLGGGGSQRFVTGHFGGLYPANGHHHHHH | |
| 566. | CH19_1-D11xI2C6-CH- | QRFCTGHFGGLHPCNGGGGGSQVQLQESGPGLVKPSQTLSLTCTVSGGSISSGGYYWSWIRQH | |
| | FcB-LY | PGKGLEWIGYIYYRGRTYYNPSLKSRVTISVDTSKNQFSLKLSSVTAADTAVYYCARVYSNYG | |
| | | WFDPWGQGTLVTVSSGGGGSGGGGSGGGGSEIVLIQSPGILSLSPGERATLSCRASQSVSSSY | |
| | | LAWYQQKPGQAPRLLIYGASSRATGIPDRFSGSGSGTDFTLTISRLEPEDFAVYYCQQYGSSP | |
| | | LTFGGGTKLEIKSGGGGSEVQLVESGGGLVQPGGSLKLSCAASGFTFNKYAMNWVRQAPGKGL | |
| | | EWVARIRSKYNNYATYYADSVKDRFTISRDDSKNTAYLQMNNLKTEDTAVYYCVRHGNFGNSY | |
| | | ISYWAYWGQGTLVTVSSGGGGSGGGGSGGGGSQTVVIQEPSLIVSPGGIVTLICGSSIGAVIS | |
| | | GNYPNWVQQKPGQAPRGLIGGTKFLAPGTPARFSGSLLGGKAALTLSGVQPEDEAEYYCVLWY | |
| | | SNRWVFGGGTKLTVLGGGGSQRFVTGHFGGLYPANGHHHHHH | |
| 567. | CH19_9-F9xI2C6-CH-FcB- | QRFCTGHFGGLHPCNGGGGGSQVQLQESGPGLVKPSETLSLTCTVSGGSISSGGYYWSWIRQH | |
| | LY | PGKGLEWIGYIFYRGRTYYNPSLKSRVTISVDTSKNQFSLKLSSVTAADTAVYYCARVYSNYG | |
| | | WFDPWGQGTLVTVSSGGGGSGGGGSGGGGSEIVLIQSPGILSLSPGERATLSCRASQSVSSSY | |
| | | LAWYQQKPGQAPRLLIYGASSRATGIPDRFSGSGSGTDFTLTISRLEPEDFAVYYCQQYGSSP | |
| | | TFGGGTKVEIKSGGGGSEVQLVESGGGLVQPGGSLKLSCAASGFIFNKYAMNWVRQAPGKGLE | |
| | | WVARIRSKYNNYATYYADSVKDRFTISRDDSKNTAYLQMNNLKTEDTAVYYCVRHGNFGNSYI | |
| | | SYWAYWGQGTLVTVSSGGGGSGGGGSGGGGSQTVVTQEPSLTVSPGGTVTLTCGSSTGAVTSG | |
| | | NYPNWVQQKPGQAPRGLIGGTKFLAPGTPARFSGSLLGGKAALTLSGVQPEDEAEYYCVLWYS | |
| | | NRWVFGGGTKLTVLGGGGSQRFVTGHFGGLYPANGHHHHHH | |
| 568. | CH19_1-H8xI2C6-CH-FcB- | QRFCTGHFGGLHPCNGGGGGSQVQLQESGPGLVKPSQTLSLTCTVSGGSISSGGYYWSWIRQH | |
| | LY | PGKGLEWIGYIFYRGRTYYNPSLKSRVTISVDTSKNQFSLKLSSVTAADTAVYYCARVYSNYG | |
| | | WFDPWGQGTLVTVSSGGGGSGGGGSGGGGSEIVLIQSPGILSLSPGERATLSCRASQSVSSSY | |
| | | LAWYQQKPGQAPRLLIYGASSRATGIPDRFSGSGSGTDFTLTISRLEPEDFAVYYCQQYGSSP | |
| | | LTFGGGTKVEIKSGGGGSEVQLVESGGGLVQPGGSLKLSCAASGFTFNKYAMNWVRQAPGKGL | |
| | | EWVARIRSKYNNYATYYADSVKDRFTISRDDSKNTAYLQMNNLKTEDTAVYYCVRHGNFGNSY | |
| | | ISYWAYWGQGTLVTVSSGGGGSGGGGSGGGGSQTVVTQEPSLTVSPGGTVTLTCGSSTGAVTS | |
| | | GNYPNWVQQKPGQAPRGLIGGTKFLAPGTPARFSGSLLGGKAALTLSGVQPEDEAEYYCVLWY | |
| | | SNRWVFGGGTKLTVLGGGGSQRFVTGHFGGLYPANGHHHHHH | |
| 569. | CH19_1-B12xI2C6-CH- | QRFCTGHFGGLHPCNGGGGGSQVQLQESGPGLVKPSQTLSLTCTVSGGSISSGGYYWSWIRQH | |
| | FcB-LY | PGKGLEWIGYIYYRGRTYYNPSLKSRVTISVDTSKNQFSLKLSSVTAADTAVYYCARVYSNYG | |
| | | WFDPWGQGTLVTVSSGGGGSGGGGSGGGGSEIVLIQSPGILSLSPGERATLSCRASQSVSSSY | |
| | | LAWYQQKPGQAPRLLIYGASSRATGIPDRFSGSGSGTDFTLTISRLEPEDFAVYYCQQYGSSP | |
| | | TFGPGTKVEIKSGGGGSEVQLVESGGGLVQPGGSLKLSCAASGFTFNKYAMNWVRQAPGKGLE | |
| | | WVARIRSKYNNYATYYADSVKDRFTISRDDSKNTAYLQMNNLKTEDTAVYYCVRHGNFGNSYI | |
| | | SYWAYWGQGTLVTVSSGGGGSGGGGSGGGGSQTVVTQEPSLTVSPGGTVTLTCGSSTGAVTSG | |
| | | NYPNWVQQKPGQAPRGLIGGTKFLAPGIPARFSGSLLGGKAALTLSGVQPEDEAEYYCVLWYS | |
| | | NRWVFGGGTKLTVLGGGGSQRFVTGHFGGLYPANGHHHHHH | |
| 570. | CH19_0-C4xI2C6-CH-FcB- | QRFCTGHFGGLHPCNGGGGGSQVQLQESGPGLVKPSQTLSLTCTVSGGSISSGGYYWSWIRQH | |
| | LY | PGKGLEWIGYIYYRGRTYYNPSLKSRVTISVDTSKNQFSLKLSSVTAADTAVYYCARVYSNYG | |
| | | WFDPWGQGTLVTVSSGGGGSGGGGSGGGGSEIVLIQSPGILSLSPGERATLSCRASQSVSSSY | |
| | | LAWYQQKPGQAPRLLIYGASSRATGIPDRFSGSGSGIDFILTISRLEPEDFAVYYCQQYGSSP | |
| | | TFGGGTKVEIKSGGGGSEVQLVESGGGLVQPGGSLKLSCAASGFTFNKYAMNWVRQAPGKGLE | |
| | | WVARIRSKYNNYATYYADSVKDRFTISRDDSKNTAYLQMNNLKTEDTAVYYCVRHGNFGNSYI | |
| | | SYWAYWGQGTLVTVSSGGGGSGGGGSGGGGSQTVVTQEPSLTVSPGGTVTLTCGSSTGAVTSG | |
| | | NYPNWVQQKPGQAPRGLIGGTKFLAPGTPARFSGSLLGGKAALTLSGVQPEDEAEYYCVLWYS | |
| | | NRWVFGGGTKLTVLGGGGSQRFVTGHFGGLYPANGHHHHHH | |
| 571. | CH19_3-F2xI2C6-CH-FcB- | QRFCTGHFGGLHPCNGGGGGSQVQLQESGPGLVKPSQTLSLTCTISGGSISSGGYYWSWIRQH | |
| | LY | PGKGLEWIGYIFYSGRTYYNPSLKSRVTISVDTSKNQFSLKLTSVTAADTAVYYCARVNSNYG | |
| | | WFDPWGQGTLVTVSSGGGGSGGGGSGGGGSEIVLIQSPGILSLSPGERATLSCRASQSVSSSY | |
| | | LAWYQQKPGQAPRLLIYGASSRATGIPDRFSGSGSGIDFILTISRLEPEDFAVYYCQQYGSSP | |
| | | TFGGGTKVEIKSGGGGSEVQLVESGGGLVQPGGSLKLSCAASGFTFNKYAMNWVRQAPGKGLE | |
| | | WVARIRSKYNNYATYYADSVKDRFTISRDDSKNTAYLQMNNLKTEDTAVYYCVRHGNFGNSYI | |
| | | SYWAYWGQGTLVTVSSGGGGSGGGGSGGGGSQTVVTQEPSLTVSPGGTVTLTCGSSTGAVTSG | |
| | | NYPNWVQQKPGQAPRGLIGGTKFLAPGTPARFSGSLLGGKAALTLSGVQPEDEAEYYCVLWYS | |
| | | NRWVFGGGTKLTVLGGGGSQRFVTGHFGGLYPANGHHHHHH | |
| 572. | CH19_3-B10xI2C6-CH- | QRFCTGHFGGLHPCNGGGGGSQVQLQESGPGLVKPSQTLSLTCTVSGGSISSGGYYWSWIRQH | |
| | FcB-LY | PGKGLDWIGYIFYRGRTYYNPSLKSRVTISVDTSKNQFSLKLSSVTAADTAVYYCARVNSNYG | |
| | | WFDPWGQGTLVTVSSGGGGSGGGGSGGGGSEIVLTQSPGTLSLSPGERATLSCRASQSVSSSY | |
| | | LAWYQQKPGQAPRLLIYGASSRATGIPDRFSGSGSGIDFILTISRLEPEDFAVYYCQQYGSSP | |
| | | LTFGGGTKVEIKSGGGGSEVQLVESGGGLVQPGGSLKLSCAASGFTFNKYAMNWVRQAPGKGL | |
| | | EWVARIRSKYNNYATYYADSVKDRFTISRDDSKNTAYLQMNNLKTEDTAVYYCVRHGNFGNSY | |
| | | ISYWAYWGQGTLVTVSSGGGGSGGGGSGGGGSQTVVIQEPSLIVSPGGIVTLICGSSTGAVIS | |
| | | GNYPNWVQQKPGQAPRGLIGGTKFLAPGTPARFSGSLLGGKAALTLSGVQPEDEAEYYCVLWY | |
| | | SNRWVFGGGTKLTVLGGGGSQRFVTGHFGGLYPANGHHHHHH | |
| 573. | CH19_0-G4xI2C6-CH-FcB- | QRFCIGHFGGLHPCNGGGGGSQVQLQESGPGLVKPSQTLSLICTVSGGSISSGGYYWSWIRQH | |
| | LY | PGKGLEWIGYIYYRGRTYYNPSLKSRVTISVDTSKNQFSLKLSSVTAADTAVYYCARVYSNYG | |
| | | WFDPWGQGTLVTVSSGGGGSGGGGSGGGGSEIVLIQSPGILSLSPGERATLSCRASQSVSSSY | |
| | | LAWYQQKPGQAPRLLIYGASTRATGIPDRFSGSGSGTDFTLTISRLEPEDFAVYYCQQYGSSP | |
| | | SFGQGTKVEIKSGGGGSEVQLVESGGGLVQPGGSLKLSCAASGFTFNKYAMNWVRQAPGKGLE | |
| | | WVARIRSKYNNYATYYADSVKDRFTISRDDSKNTAYLQMNNLKTEDTAVYYCVRHGNFGNSYI | |
| | | SYWAYWGQGTLVTVSSGGGGSGGGGSGGGGSQTVVTQEPSLTVSPGGTVTLTCGSSTGAVTSG | |
| | | NYPNWVQQKPGQAPRGLIGGIKFLAPGTPARFSGSLLGGKAALTLSGVQPEDEAEYYCVLWYS | |
| | | NRWVFGGGTKLTVLGGGGSQRFVTGHFGGLYPANGHHHHHH | |
| 574. | CH19_0-H5xI2C6-CH-FcB- | QRFCTGHFGGLHPCNGGGGGSQVQLQESGPGLVRPSQTLSLTCTVSGGSISSGGYYWSWIRQH | |
| | LY | PGKGLEWIGYIYYRGRTYYNPSLKSRVTISVDTSKNQFSLKLSSVTAADTAVYYCARVYSNYG | |
| | | WFDPWGQGTLVTVSSGGGGSGGGGSGGGGSEIVLIQSPGILSLSPGERATLSCRASQSVSSSY | |
| | | LAWYQQKPGQAPRLLIYGASSRATGIPDRFSGSGSGTDFTLTISRLEPEDFAVYYCQQYDTSP | |
| | | LTFGGGTKVEIKSGGGGSEVQLVESGGGLVQPGGSLKLSCAASGFTFNKYAMNWVRQAPGKGL | |
| | | EWVARIRSKYNNYATYYADSVKDRFTISRDDSKNTAYLQMNNLKTEDTAVYYCVRHGNFGNSY | |
| | | ISYWAYWGQGTLVTVSSGGGGSGGGGSGGGGSQTVVTQEPSLTVSPGGTVTLTCGSSTGAVTS | |
| | | GNYPNWVQQKPGQAPRGLIGGTKFLAPGTPARFSGSLLGGKAALTLSGVQPEDEAEYYCVLWY | |
| | | SNRWVFGGGTKLTVLGGGGSQRFVTGHFGGLYPANGHHHHHH | |
| 575. | CH19_0-B8xI2C6-CH-FcB- | QRFCTGHFGGLHPCNGGGGGSQVQLQESGPGLVKPSQTLSLTCTVSGGSISSGGYYWSWIRQH | |
| | LY | PGKGLEWIGYIYYRGRTYYNPSLKSRVTISVDTSKNQFSLKLSSVTAADTAVYYCARVYSNYG | |
| | | WFDPWGQGTLVTVSSGGGGSGGGGSGGGGSEIVLIQSPGILSLSPGERATLSCRASQSVSSSY | |
| | | LAWYQQKPGQAPRLLIYGASSRATGIPDRFSGSGSGTDFTLTISRLEPEDFAVYYCQQYGSSP | |
| | | TFGGGTKVEIKSGGGGSEVQLVESGGGLVQPGGSLKLSCAASGFTFNKYAMNWVRQAPGKGLE | |
| | | WVARIRSKYNNYATYYADSVKDRFTISRDDSKNTAYLQMNNLKTEDTAVYYCVRHGNFGNSYI | |
| | | SYWAYWGQGTLVTVSSGGGGSGGGGSGGGGSQTVVTQEPSLTVSPGGTVTLTCGSSTGAVTSG | |
| | | NYPNWVQQKPGQAPRGLIGGTKFLAPGTPARFSGSLLGGKAALTLSGVQPEDEAEYYCVLWYS | |
| | | NRWVFGGGTKLTVLGGGGSQRFVTGHFGGLYPANGHHHHHH | |
| 576. | CH19_2-D9xI2C6-CH-FcB- | QRFCTGHFGGLHPCNGGGGGSQVQLQESGPGLVKPSQTLSLTCTVSGGSISSGGYYWSWIRQH | |
| | LY | PGKGLEWIGYIYYRGRTYYNPSLKSRVTISVDTSKNQFSLKLSSVTAADTAVYYCARVYSNYG | |
| | | WFDPWGQGTLVTVSSGGGGSGGGGSGGGGSEIVLIQSPGILSLSPGERATLSCRASQSVSSSY | |
| | | LAWYQQKPGQAPRLLIYGASSRATGIPDRFSGSGSGIDFTLTISRLEPEDFAVYYCQQYGSSP | |
| | | LTFGGGTKVEIKSGGGGSEVQLVESGGGLVQPGGSLKLSCAASGFTFNKYAMNWVRQAPGKGL | |
| | | EWVARIRSKYNNYATYYADSVKDRFTISRDDSKNTAYLQMNNLKTEDTAVYYCVRHGNFGNSY | |
| | | ISYWAYWGQGTLVTVSSGGGGSGGGGSGGGGSQTVVTQEPSLTVSPGGTVTLTCGSSTGAVTS | |
| | | GNYPNWVQQKPGQAPRGLIGGTKFLAPGTPARFSGSLLGGKAALTLSGVQPEDEAEYYCVLWY | |
| | | SNRWVFGGGTKLTVLGGGGSQRFVTGHFGGLYPANGHHHHHH | |
| 577. | CH19_8-H7xI2C6-CH-FcB- | QRFCTGHFGGLHPCNGGGGGSQVQLQESGPGLVKPSQTLSLTCTVSGGSISSGGYYWSWVRQH | |
| | LY | PGKGLEWIGYIFYSGRTYYNPSLKSRVIISVDTSKNQFSLKLSSVTAADTAVYYCARVYSNYG | |
| | | WFDPWGQGTLVTVSSGGGGSGGGGSGGGGSEIVLIQSPGILSLSPGERATLSCRASQSVSSSY | |
| | | LAWYQQKPGQAPRLLIYGASSRATGIPDRFSGSGSGTDFTLTISRLEPEDFAVYYCQQYGSSP | |
| | | LTFGGGTKVEIKSGGGGSEVQLVESGGGLVQPGGSLKLSCAASGFTFNKYAMNWVRQAPGKGL | |
| | | EWVARIRSKYNNYATYYADSVKDRFTISRDDSKNTAYLQMNNLKTEDTAVYYCVRHGNFGNSY | |
| | | ISYWAYWGQGTLVTVSSGGGGSGGGGSGGGGSQTVVIQEPSLIVSPGGIVTLICGSSTGAVIS | |
| | | GNYPNWVQQKPGQAPRGLIGGTKFLAPGTPARFSGSLLGGKAALTLSGVQPEDEAEYYCVLWY | |
| | | SNRWVFGGGTKLTVLGGGGSQRFVTGHFGGLYPANGHHHHHH | |
| 578. | CH19_9-C2xI2C6-CH-FcB- | QRFCTGHFGGLHPCNGGGGGSQVQLQESGPGLVKPSQTLSLTCTVSGGSISSGGYYWSWIRQH | |
| | LY | PGKGLEWIGYIFYSGRTYYNPSLKSRVTISVDTSKNQFSLKLSSVTAADTAVYYCARVYSNYG | |
| | | WFDPWGQGTLVTVSSGGGGSGGGGSGGGGSEIVLIQSPGILSLSPGERATLSCRASQSVSSSY | |
| | | LAWYQQKPGQAPRLLIYGASSRATGIPDRFSGSGSGTDFTLTISRLEPEDFAVYYCQQYGSSP | |
| | | LTFGGGTKVEIKSGGGGSEVQLVESGGGLVQPGGSLKLSCAASGFTFNKYAMNWVRQAPGKGL | |
| | | EWVARIRSKYNNYATYYADSVKDRFTISRDDSKNTAYLQMNNLKTEDTAVYYCVRHGNFGNSY | |
| | | ISYWAYWGQGTLVTVSSGGGGSGGGGSGGGGSQTVVIQEPSLIVSPGGIVTLICGSSTGAVIS | |
| | | GNYPNWVQQKPGQAPRGLIGGTKFLAPGTPARFSGSLLGGKAALTLSGVQPEDEAEYYCVLWY | |
| | | SNRWVFGGGTKLTVLGGGGSQRFVTGHFGGLYPANGHHHHHH | |
| 579. | CH19_3-D5xI2C6-CH-FcB- | QRFCTGHFGGLHPCNGGGGGSQVQLQESGPGLVKPSQTLSLTCTVSGGSISSGGYYWSWIRQH | |
| | LY | PGKGLEWIGYIFYSGRTYYNPSLKSRVSISVDTSKNQFSLKLSSVTAADTAVYYCARVYSNYG | |
| | | WFDPWGQGTLVTVSSGGGGSGGGGSGGGGSEIVLIQSPGILSLSPGERATLSCRASQSVSSSY | |
| | | LAWYQQKPGQAPRLLIYGASSRATGIPDRFSGSGSGTDFTLTISRLEPEDFAVYYCQQYGSSP | |
| | | LTFGGGTKVEIKSGGGGSEVQLVESGGGLVQPGGSLKLSCAASGFTFNKYAMNWVRQAPGKGL | |
| | | EWVARIRSKYNNYATYYADSVKDRFTISRDDSKNTAYLQMNNLKTEDTAVYYCVRHGNFGNSY | |
| | | ISYWAYWGQGTLVTVSSGGGGSGGGGSGGGGSQTVVTQEPSLTVSPGGTVTLTCGSSTGAVTS | |
| | | GNYPNWVQQKPGQAPRGLIGGTKFLAPGTPARFSGSLLGGKAALTLSGVQPEDEAEYYCVLWY | |
| | | SNRWVFGGGTKLTVLGGGGSQRFVTGHFGGLYPANGHHHHHH | |
| 580. | CH19_1-G11xI2C6-CH- | QRFCTGHFGGLHPCNGGGGGSQVQLQESGPGLVKPSETLSLTCTVSGGSVSSGGYYWSWIRQP | |
| | FcB-LY | PGKGLEWIGYIYYRGRTYYNPSLKSRVTISVDTSKNQFSLKLSSVTAADTAVYYCARVYSNYG | |
| | | WFDPWGQGTLVTVSSGGGGSGGGGSGGGGSEIVLIQSPGILSLSPGERATLSCRASQSVSSSY | |
| | | LAWYQQKPGQAPRLLIYGASSRATGIPDRFSGSGSGTDFTLTISRLEPEDFAVYYCQQYGSSP | |
| | | LTFGGGTKVEIKSGGGGSEVQLVESGGGLVQPGGSLKLSCAASGFTFNKYAMNWVRQAPGKGL | |
| | | EWVARIRSKYNNYATYYADSVKDRFTISRDDSKNTAYLQMNNLKTEDTAVYYCVRHGNFGNSY | |
| | | ISYWAYWGQGTLVTVSSGGGGSGGGGSGGGGSQTVVTQEPSLTVSPGGTVTLTCGSSTGAVTS | |
| | | GNYPNWVQQKPGQAPRGLIGGTKFLAPGTPARFSGSLLGGKAALTLSGVQPEDEAEYYCVLWY | |
| | | SNRWVFGGGTKLTVLGGGGSQRFVTGHFGGLYPANGHHHHHH | |
| 581. | CH19_1-H11xI2C6-CH- | QRFCTGHFGGLHPCNGGGGGSQVQLQESGPGLVKPSQTLSLTCTVSGGSISSGGYYWSWIRQH | |
| | FcB-LY | PGKGLEWIGYIYYRGRTYYNPSLKSRVTISVDTSKNQFSLKLSSVTAADTAVYYCARVYSNYG | |
| | | WFDPWGQGTLVTVSSGGGGSGGGGSGGGGSEIVLIQSPGILSLSPGERATLSCRASQSVSSSY | |
| | | LAWYQQKPGQAPRLLIYGASSRATGIPDRFSGSGSGIDFILTISRLEPEDFAVYYCQQYGSSP | |
| | | TFGQGTRLEIKSGGGGSEVQLVESGGGLVQPGGSLKLSCAASGFTFNKYAMNWVRQAPGKGLE | |
| | | WVARIRSKYNNYATYYADSVKDRFTISRDDSKNTAYLQMNNLKTEDTAVYYCVRHGNFGNSYI | |
| | | SYWAYWGQGTLVTVSSGGGGSGGGGSGGGGSQTVVTQEPSLTVSPGGTVTLTCGSSTGAVTSG | |
| | | NYPNWVQQKPGQAPRGLIGGTKFLAPGTPARFSGSLLGGKAALTLSGVQPEDEAEYYCVLWYS | |
| | | NRWVFGGGTKLTVLGGGGSQRFVTGHFGGLYPANGHHHHHH | |
| 582. | CH19_9-F3xI2C6-CH-FcB- | QRFCTGHFGGLHPCNGGGGGSQVQLQESGPGLVKPSQTLSLTCTVSGGSISSGGYYWSWIRQH | |
| | LY | PGKGLEWIGYIFYSGKTYYNPSLKSRVSISVDTSKNQFSLKLSSVTAADTAVYYCARVYSNYG | |
| | | WFDPWGQGTLVTVSSGGGGSGGGGSGGGGSEIVLIQSPGILSLSPGERATLSCRASQSVSSSY | |
| | | LAWYQQKPGQAPRLLIYGASSRATGIPDRFSGSGSGIDFILTISRLEPEDFAVYYCQQYGSSP | |
| | | ITFGQGTRLEIKSGGGGSEVQLVESGGGLVQPGGSLKLSCAASGFTFNKYAMNWVRQAPGKGL | |
| | | EWVARIRSKYNNYATYYADSVKDRFTISRDDSKNTAYLQMNNLKTEDTAVYYCVRHGNFGNSY | |
| | | ISYWAYWGQGTLVTVSSGGGGSGGGGSGGGGSQTVVTQEPSLTVSPGGTVTLTCGSSTGAVTS | |
| | | GNYPNWVQQKPGQAPRGLIGGTKFLAPGTPARFSGSLLGGKAALTLSGVQPEDEAEYYCVLWY | |
| | | SNRWVFGGGTKLTVLGGGGSQRFVTGHFGGLYPANGHHHHHH | |
| 583. | CH19_2-G6xI2C6-CH-FcB- | QRFCIGHFGGLHPCNGGGGGSQVQLQESGPGLVKPSETLSLICTVSGGSISSYYWSWIRQPPG | |
| | LY | KGLEWIGYIYYSGSTNYNPSLKSRVTMSIDTSKNQFSLKLISVTAADTAVYYCARDQRRIVAA | |
| | | GGYYYGMDVWGQGTTVTVSSGGGGSGGGGSGGGGSEIVLTQSPGILSLSPGERATLSCRASQS | |
| | | VSSSYLAWYQQKPGQAPRLLIYGASTRATGIPARFSGSGSGTDFTLTISRLEPEDFAVYYCQQ | |
| | | YGSSPFTFGPGTKVDIKSGGGGSEVQLVESGGGLVQPGGSLKLSCAASGFTFNKYAMNWVRQA | |
| | | PGKGLEWVARIRSKYNNYATYYADSVKDRFTISRDDSKNTAYLQMNNLKTEDTAVYYCVRHGN | |
| | | FGNSYISYWAYWGQGTLVTVSSGGGGSGGGGSGGGGSQTVVTQEPSLIVSPGGIVTLICGSST | |
| | | GAVTSGNYPNWVQQKPGQAPRGLIGGTKFLAPGTPARFSGSLLGGKAALTLSGVQPEDEAEYY | |
| | | CVLWYSNRWVFGGGTKLTVLGGGGSQRFVTGHFGGLYPANGHHHHHH | |
| 584. | CH19_2-H7xI2C6-CH-FcB- | QRFCIGHFGGLHPCNGGGGGSQVQLQESGPGLVKPSQTLSLICTVSGGSISSNDYYWSWIRQH | |
| | LY | PGKGLEWIGYIYYSGSTFYNPSLKSRGAISVDTSKNQFSLKLTSVTAADTAVYYCARGVYRIG | |
| | | AFDIWGQGTMVTVSSGGGGSGGGGSGGGGSDIQMTQSPSSLSASVGDRVTITCRASQSISSYL | |
| | | NWYQQKPGKAPKSLIYAASSLQSGVPSKFSGSGSGTDFTLTISSLQPEDIATYYCQQSYSTPQ | |
| | | AFGGGTKVDIKSGGGGSEVQLVESGGGLVQPGGSLKLSCAASGFIFNKYAMNWVRQAPGKGLE | |
| | | WVARIRSKYNNYATYYADSVKDRFTISRDDSKNTAYLQMNNLKTEDTAVYYCVRHGNFGNSYI | |
| | | SYWAYWGQGTLVTVSSGGGGSGGGGSGGGGSQTVVTQEPSLTVSPGGTVTLTCGSSTGAVTSG | |
| | | NYPNWVQQKPGQAPRGLIGGIKFLAPGTPARFSGSLLGGKAALTLSGVQPEDEAEYYCVLWYS | |
| | | NRWVFGGGTKLTVLGGGGSQRFVTGHFGGLYPANGHHHHHH | |
| 585. | CH19_5-B3xI2C6-CH-FcB- | QRFCTGHFGGLHPCNGGGGGSQVQLVQSGAEVKKPGASVKVSCKASGYTFTYYGISWVRQAPG | |
| | LY | QGLEWMGWINPYGGETNYAQKLQGRVTMTTDTSTSTAYMELRSLRSDDTAVYYCARGSGGFDY | |
| | | WGQGTLVTVSSGGGGSGGGGSGGGGSDIVMTQTPLSLSVTPGEPASISCRSSQSLLHSNGYNY | |
| | | LDWYLQKPGQSPQLLIYLGSYRASGVPDRFSGSGSGTDFTLKISRVEAEDVGVYYCMQALQTP | |
| | | FTFGPGTKVDIKSGGGGSEVQLVESGGGLVQPGGSLKLSCAASGFTFNKYAMNWVRQAPGKGL | |
| | | EWVARIRSKYNNYATYYADSVKDRFTISRDDSKNTAYLQMNNLKTEDTAVYYCVRHGNFGNSY | |
| | | ISYWAYWGQGTLVTVSSGGGGSGGGGSGGGGSQTVVTQEPSLTVSPGGTVTLTCGSSTGAVTS | |
| | | GNYPNWVQQKPGQAPRGLIGGTKFLAPGTPARFSGSLLGGKAALTLSGVQPEDEAEYYCVLWY | |
| | | SNRWVFGGGTKLTVLGGGGSQRFVTGHFGGLYPANGHHHHHH | |
| 586. | CH19_5-E10xI2C6-CH- | QRFCTGHFGGLHPCNGGGGGSQVQLVQSGAEVKKPGASVKVSCKASGYTFTYYGISWVRQAPG | |
| | FcB-LY | QGLEWMGWINPYSGATNYAQKLQGRVTMTTDTSTSTAYMELRSLRSDDTAVYYCARGSGGFDY | |
| | | WGQGTLVTVSSGGGGSGGGGSGGGGSDIVMTQTPLSLSVTPGEPASISCRSSQSLLHSNGYNY | |
| | | LDWYLQKPGQSPQLLIYLGSYRASGVPDRFSGSGSGTDFTLKISRVEAEDVGVYYCMQALQTP | |
| | | FTFGPGTKVDIKSGGGGSEVQLVESGGGLVQPGGSLKLSCAASGFTFNKYAMNWVRQAPGKGL | |
| | | EWVARIRSKYNNYATYYADSVKDRFTISRDDSKNTAYLQMNNLKTEDTAVYYCVRHGNFGNSY | |
| | | ISYWAYWGQGTLVTVSSGGGGSGGGGSGGGGSQTVVTQEPSLTVSPGGTVTLTCGSSTGAVTS | |
| | | GNYPNWVQQKPGQAPRGLIGGTKFLAPGTPARFSGSLLGGKAALTLSGVQPEDEAEYYCVLWY | |
| | | SNRWVFGGGTKLTVLGGGGSQRFVTGHFGGLYPANGHHHHHH | |
| 587. | CH19_6-G10xI2C6-CH- | QRFCTGHFGGLHPCNGGGGGSQVQLVQSGAEVKKPGASVKVSCKASGYTFTYYGISWVRQAPG | |
| | FcB-LY | QGLEWMGWINPYTGKTNYAQKLQGRVTMTIDTSTSTAYMELRSLRSDDTAVYYCARGSGGFDY | |
| | | WGQGTLVTVSSGGGGSGGGGSGGGGSDIVMTQTPLSLSVTPGEPASISCRSSQSLLHSNGYNY | |
| | | LDWYLQKPGQSPQLLIYLGSYRASGVPDRFSGSGSGIDFTLKISRVEAEDVGVYYCMQALQTP | |
| | | FTFGPGTKVDIKSGGGGSEVQLVESGGGLVQPGGSLKLSCAASGFTFNKYAMNWVRQAPGKGL | |
| | | EWVARIRSKYNNYATYYADSVKDRFTISRDDSKNTAYLQMNNLKTEDTAVYYCVRHGNFGNSY | |
| | | ISYWAYWGQGTLVTVSSGGGGSGGGGSGGGGSQTVVTQEPSLTVSPGGTVTLTCGSSTGAVTS | |
| | | GNYPNWVQQKPGQAPRGLIGGTKFLAPGTPARFSGSLLGGKAALTLSGVQPEDEAEYYCVLWY | |
| | | SNRWVFGGGTKLTVLGGGGSQRFVTGHFGGLYPANGHHHHHH | |
| 588. | CH19_4-H8xI2C6-CH-FcB- | QRFCTGHFGGLHPCNGGGGGSQVQLVQSGAEVKKPGASVKVSCKASGYTFTYYGISWVRQAPG | |
| | LY | QGLEWMGWINPYIGKTNYAQKLQGRVIMITDTSTSTAYMELRSLRSDDTAVYYCARGSGGFDY | |
| | | WGQGTLVTVSSGGGGSGGGGSGGGGSDIVMTQTPLSLSVTPGEPASISCRSSQSLLHSVGYNY | |
| | | LDWYLQKPGQSPQLLIYLGSYRASGVPDRFSGSGSGIDFTLKISRVEAEDVGVYYCMQALQTP | |
| | | FTFGPGTKVDIKSGGGGSEVQLVESGGGLVQPGGSLKLSCAASGFTFNKYAMNWVRQAPGKGL | |
| | | EWVARIRSKYNNYATYYADSVKDRFTISRDDSKNTAYLQMNNLKTEDTAVYYCVRHGNFGNSY | |
| | | ISYWAYWGQGTLVTVSSGGGGSGGGGSGGGGSQTVVIQEPSLIVSPGGIVTLICGSSIGAVIS | |
| | | GNYPNWVQQKPGQAPRGLIGGTKFLAPGTPARFSGSLLGGKAALTLSGVQPEDEAEYYCVLWY | |
| | | SNRWVFGGGTKLTVLGGGGSQRFVTGHFGGLYPANGHHHHHH | |
| 589. | CH19_2-E4xI2C6-CH-FcB- | QRFCTGHFGGLHPCNGGGGGSQVQLVQSGAEVKKPGASVKVSCKASGYTFTSYGISWVRQAPG | |
| | LY | QGLEWMGWINPYTGNRNYAQKVQDRVIMITDTSINTAYMELSSLRSDDTAVYYCARGSGGFDY | |
| | | WGQGTLVTVSSGGGGSGGGGSGGGGSDIVMTQSPLSLPVTLGQPASISCRSSQSLLHSVGYNY | |
| | | LDWYLQKPGQSPQLLIYLGSNRASGVPDRFSGSGSGTDFTLKISRVEAEDVGVYYCMQALQTP | |
| | | FTFGPGTKLEIKSGGGGSEVQLVESGGGLVQPGGSLKLSCAASGFTFNKYAMNWVRQAPGKGL | |
| | | EWVARIRSKYNNYATYYADSVKDRFTISRDDSKNTAYLQMNNLKTEDTAVYYCVRHGNFGNSY | |
| | | ISYWAYWGQGTLVTVSSGGGGSGGGGSGGGGSQTVVIQEPSLIVSPGGIVTLICGSSIGAVIS | |
| | | GNYPNWVQQKPGQAPRGLIGGTKFLAPGTPARFSGSLLGGKAALTLSGVQPEDEAEYYCVLWY | |
| | | SNRWVFGGGTKLTVLGGGGSQRFVTGHFGGLYPANGHHHHHH | |
| 590. | CH19_6-B8xI2C6-CH-FcB- | QRFCTGHFGGLHPCNGGGGGSQVQLVQSGAEVKKPGASVKVSCKASGYTFTYYGISWVRQAPG | |
| | LY | QGLEWMGWINPYTGKTNYAQKLQDRVTMTTDTSTNTAYMELRSLRSDDTAVYYCARGSGGFDY | |
| | | WGQGTLVTVSSGGGGSGGGGSGGGGSDIVMTQTPLSLPVTPGEPASISCRSSQSLLHSVGYNY | |
| | | LDWYLQKPGQSPQLLIYLGSNRASGVPDRFSGSGSGIDFTLKISRVEAEDVGVYYCMQALQIP | |
| | | FTFGPGTKVDIKSGGGGSEVQLVESGGGLVQPGGSLKLSCAASGFTFNKYAMNWVRQAPGKGL | |
| | | EWVARIRSKYNNYATYYADSVKDRFTISRDDSKNTAYLQMNNLKTEDTAVYYCVRHGNFGNSY | |
| | | ISYWAYWGQGTLVTVSSGGGGSGGGGSGGGGSQTVVTQEPSLTVSPGGTVTLTCGSSTGAVTS | |
| | | GNYPNWVQQKPGQAPRGLIGGTKFLAPGTPARFSGSLLGGKAALTLSGVQPEDEAEYYCVLWY | |
| | | SNRWVFGGGTKLTVLGGGGSQRFVTGHFGGLYPANGHHHHHH | |
| 591. | CH19_0-B4xI2C6-CH-FcB- | QRFCTGHFGGLHPCNGGGGGSQVQLVQSGAEVKKPGASVKVSCKASGYTFTTYGISWVRQAPG | |
| | LY | QGLEWMGWINPYTGKTNYAQKLQGRVTMATDTSTSTAYMELRSLRSDDTAVYYCARGSGGFDY | |
| | | WGQGTLVTVSSGGGGSGGGGSGGGGSDIVMTQSPLSLPVTPGEPASISCRSSQSLLHSVGYNY | |
| | | LDWYLQKPGQSPQLLIYLGSNRASGVPDRFSGSGSGTDFTLKISRVEAEDVGVYYCMQALQTP | |
| | | FTFGPGTKLEIKSGGGGSEVQLVESGGGLVQPGGSLKLSCAASGFTFNKYAMNWVRQAPGKGL | |
| | | EWVARIRSKYNNYATYYADSVKDRFTISRDDSKNTAYLQMNNLKTEDTAVYYCVRHGNFGNSY | |
| | | ISYWAYWGQGTLVTVSSGGGGSGGGGSGGGGSQTVVTQEPSLTVSPGGTVTLTCGSSTGAVTS | |
| | | GNYPNWVQQKPGQAPRGLIGGTKFLAPGTPARFSGSLLGGKAALTLSGVQPEDEAEYYCVLWY | |
| | | SNRWVFGGGTKLTVLGGGGSQRFVTGHFGGLYPANGHHHHHH | |
| 592. | CH19_9-F1xI2C6-CH-FcB- | QRFCIGHFGGLHPCNGGGGGSQVQLVQSGAEVKEPGASVKVSCKASGYTFTYYGISWVRQAPG | |
| | LY | QGLEWMGWINPYTGNRNYAQKVQDRVTMTTDTSTNTAYMELRSLRSDDTAVYYCARGSGGFDY | |
| | | WGQGTLVTVSSGGGGSGGGGSGGGGSDIVMTQSPLSLPVTPGEPASISCRSSQSLLHSVGYNY | |
| | | LDWYLQKPGQSPQLLTYLGSNRASGVPDRFSGSGSGIDFTLKISRVEAEDVGVYYCMQALQIP | |
| | | FTFGPGTKLEIKSGGGGSEVQLVESGGGLVQPGGSLKLSCAASGFTFNKYAMNWVRQAPGKGL | |
| | | EWVARIRSKYNNYATYYADSVKDRFTISRDDSKNTAYLQMNNLKTEDTAVYYCVRHGNFGNSY | |
| | | ISYWAYWGQGTLVTVSSGGGGSGGGGSGGGGSQTVVTQEPSLTVSPGGTVTLTCGSSTGAVTS | |
| | | GNYPNWVQQKPGQAPRGLIGGTKFLAPGTPARFSGSLLGGKAALTLSGVQPEDEAEYYCVLWY | |
| | | SNRWVFGGGTKLTVLGGGGSQRFVTGHFGGLYPANGHHHHHH | |
| 593. | CH19_4-A7xI2C6-CH-FcB- | QRFCTGHFGGLHPCNGGGGGSQVQLVQSGAEVKKPGASVKVSCKASGYTFTYYGISWVRQAPG | |
| | LY | QGLEWMGWINPYIGKTNYAQKLQGRVIMITDTSTSTAYMELRSLRSDDTAVYYCARGSGGFDY | |
| | | WGQGTLVTVSSGGGGSGGGGSGGGGSDIVMTQSPLSLPVTPGEPASISCRSSQSLLHSVGYNY | |
| | | LDWYLQKPGQSPQLLTYLGSNRASGVPDRFSGSGSGIDFTLKISRVEAEDVGVYYCMQALQIP | |
| | | FTFGPGTKVEIKSGGGGSEVQLVESGGGLVQPGGSLKLSCAASGFTFNKYAMNWVRQAPGKGL | |
| | | EWVARIRSKYNNYATYYADSVKDRFTISRDDSKNTAYLQMNNLKTEDTAVYYCVRHGNFGNSY | |
| | | ISYWAYWGQGTLVTVSSGGGGSGGGGSGGGGSQTVVTQEPSLTVSPGGTVTLTCGSSTGAVTS | |
| | | GNYPNWVQQKPGQAPRGLIGGTKFLAPGTPARFSGSLLGGKAALTLSGVQPEDEAEYYCVLWY | |
| | | SNRWVFGGGTKLTVLGGGGSQRFVTGHFGGLYPANGHHHHHH | |
| 594. | CH19_6-E12xI2C6-CH- | QRFCIGHFGGLHPCNGGGGGSQVQLVQSGAEVKKPGASVKVSCKASGYTFTSYGITWVRQAPG | |
| | FcB-LY | QGLEWMGWINPYTGNRNYAQKVQGRVTMTTDTSTSTAYMELRSLRSDDTAVYYCARGSGGFDY | |
| | | WGQGTLVTVSSGGGGSGGGGSGGGGSDIVMTQSPLSLSVTPGEPASISCRSSQSLLHSVGYNY | |
| | | LDWYLQKPGQSPQLLTYLGSNRASGVPDRFSGSGSGIDFTLKISRVEAEDVGVYYCMQALQIP | |
| | | FTFGPGTKVDIKSGGGGSEVQLVESGGGLVQPGGSLKLSCAASGFTFNKYAMNWVRQAPGKGL | |
| | | EWVARIRSKYNNYATYYADSVKDRFTISRDDSKNTAYLQMNNLKTEDTAVYYCVRHGNFGNSY | |
| | | ISYWAYWGQGTLVTVSSGGGGSGGGGSGGGGSQTVVIQEPSLIVSPGGIVTLICGSSIGAVIS | |
| | | GNYPNWVQQKPGQAPRGLIGGTKFLAPGTPARFSGSLLGGKAALTLSGVQPEDEAEYYCVLWY | |
| | | SNRWVFGGGTKLTVLGGGGSQRFVTGHFGGLYPANGHHHHHH | |
| 595. | CH19_6-C12xI2C6-CH- | QRFCTGHFGGLHPCNGGGGGSQVQLVQSGAEVKKPGASVKVSCKASGYTFTSYGISWVRQAPG | |
| | FcB-LY | QGLEWMGWINPYTGNRNYAQKFQGRVTMTTDTSTNTAYMELSSLRSEDTAVYYCARGSGGFDY | |
| | | WGQGTLVTVSSGGGGSGGGGSGGGGSDIVMTQSPLSLPVTPGEPASISCRSSQSLLHSVGYNY | |
| | | LDWYLQKPGQSPQLLIYLGSNRASGVPDRFSGSGSGTDFTLKISRVEAEDVGVYYCMQALQTP | |
| | | FTFGPGTKVDIKSGGGGSEVQLVESGGGLVQPGGSLKLSCAASGFTFNKYAMNWVRQAPGKGL | |
| | | EWVARIRSKYNNYATYYADSVKDRFTISRDDSKNTAYLQMNNLKTEDTAVYYCVRHGNFGNSY | |
| | | ISYWAYWGQGTLVTVSSGGGGSGGGGSGGGGSQTVVTQEPSLTVSPGGTVTLTCGSSTGAVTS | |
| | | GNYPNWVQQKPGQAPRGLIGGTKFLAPGTPARFSGSLLGGKAALTLSGVQPEDEAEYYCVLWY | |
| | | SNRWVFGGGTKLTVLGGGGSQRFVTGHFGGLYPANGHHHHHH | |
| 596. | CH19_6-A7xI2C6-CH-FcB- | QRFCTGHFGGLHPCNGGGGGSQVQLVQSGAEVKKPGASVKVSCKASGYSFTSYGISWVRQAPG | |
| | LY | QGLEWMGWINPYTGNRNYAQKVQGRVTMTTDTSTSTAYMELRSLRSDDTAVYYCARGSGGFDY | |
| | | WGQGILVTVSSGGGGSGGGGSGGGGSDIVMTQSPLSLPVTPGEPASISCRSSQSLLHSVGYNY | |
| | | LDWYLQKPGQSPQLLIYLGSNRASGVPDRFSGSGSGTDFTLKISRVEAEDVGVYYCMQALQTP | |
| | | FTFGPGTKVEIKSGGGGSEVQLVESGGGLVQPGGSLKLSCAASGFTFNKYAMNWVRQAPGKGL | |
| | | EWVARIRSKYNNYATYYADSVKDRFTISRDDSKNTAYLQMNNLKTEDTAVYYCVRHGNFGNSY | |
| | | ISYWAYWGQGTLVTVSSGGGGSGGGGSGGGGSQTVVTQEPSLTVSPGGTVTLTCGSSTGAVTS | |
| | | GNYPNWVQQKPGQAPRGLIGGTKFLAPGTPARFSGSLLGGKAALTLSGVQPEDEAEYYCVLWY | |
| | | SNRWVFGGGTKLTVLGGGGSQRFVTGHFGGLYPANGHHHHHH | |
| 597. | CH19_6-G8xI2C6-CH-FcB- | QRFCTGHFGGLHPCNGGGGGSQVQLVQSGAEVKKPGASVKVSCKASGYTFTYYGISWVRQAPG | |
| | LY | QGLEWMGWINPYTGKTNYAQKVQGRVTMTTDTSTSTAYMELRNLRSDDTAVYYCARGSGGFDY | |
| | | WGQGTLVTVSSGGGGSGGGGSGGGGSDIVMTQTPLSLSVTPGQPASISCRSSQSLLHSVGYNY | |
| | | LDWYLQKPGQSPQLLIYLGSNRASGVPDRFSGSGSGTDFTLKISRVEAEDVGVYYCMQALQTP | |
| | | FTFGPGTKVDIKSGGGGSEVQLVESGGGLVQPGGSLKLSCAASGFTFNKYAMNWVRQAPGKGL | |
| | | EWVARIRSKYNNYATYYADSVKDRFTISRDDSKNTAYLQMNNLKTEDTAVYYCVRHGNFGNSY | |
| | | ISYWAYWGQGTLVTVSSGGGGSGGGGSGGGGSQTVVTQEPSLTVSPGGTVTLTCGSSTGAVTS | |
| | | GNYPNWVQQKPGQAPRGLIGGTKFLAPGTPARFSGSLLGGKAALTLSGVQPEDEAEYYCVLWY | |
| | | SNRWVFGGGTKLTVLGGGGSQRFVTGHFGGLYPANGHHHHHH | |
| 598. | CH19_6-F9xI2C6-CH-FcB- | QRFCTGHFGGLHPCNGGGGGSQVQLVQSGAEVKKPGASVKVSCKASGYTFTYYGISWVRQAPG | |
| | LY | QGLEWMGWINPYTGKTNYAQKLQGRVTMTIDTSTSTAYMELRSLRSDDTAVYYCARGSGGFDY | |
| | | WGQGTLVTVSSGGGGSGGGGSGGGGSDIVMTQTPLSLSVTPGQPASISCRSSQSLLHSVGYNY | |
| | | LDWYLQKPGQSPQLLIYLGSNRASGVPDRFSGSGSGIDFTLKISRVEAEDVGVYYCMQALQTP | |
| | | FTFGPGTKVDIKSGGGGSEVQLVESGGGLVQPGGSLKLSCAASGFTFNKYAMNWVRQAPGKGL | |
| | | EWVARIRSKYNNYATYYADSVKDRFTISRDDSKNTAYLQMNNLKTEDTAVYYCVRHGNFGNSY | |
| | | ISYWAYWGQGTLVTVSSGGGGSGGGGSGGGGSQTVVTQEPSLTVSPGGTVTLTCGSSTGAVTS | |
| | | GNYPNWVQQKPGQAPRGLIGGTKFLAPGTPARFSGSLLGGKAALTLSGVQPEDEAEYYCVLWY | |
| | | SNRWVFGGGTKLTVLGGGGSQRFVTGHFGGLYPANGHHHHHH | |
| 599. | CH19_0-C11xI2C6-CH- | QRFCTGHFGGLHPCNGGGGGSQVQLVESGGGVVQPGRSLRLSCAASGFTFRNYAMHWVRQAPG | |
| | FcB-LY | KGLEWVAVISYSGNNKYYASSVKGRFTISRDNSKNTLYLQLNSLRAEDTAVYYCAREFYYDST | |
| | | GYDYSTPGDYWGQGTLVTVSSGGGGSGGGGSGGGGSDIQMTQSPSSLSASVGDRVTITCQASQ | |
| | | DISNYLNWYQQKPGKAPKLLIYDASNLEIGVPSRFSGSGSGTDFIFTISSLQPEDIATYYCQQ | |
| | | YDNLPTFGQGTRLEIKSGGGGSEVQLVESGGGLVQPGGSLKLSCAASGFTFNKYAMNWVRQAP | |
| | | GKGLEWVARIRSKYNNYATYYADSVKDRFTISRDDSKNTAYLQMNNLKTEDTAVYYCVRHGNF | |
| | | GNSYISYWAYWGQGTLVTVSSGGGGSGGGGSGGGGSQTVVTQEPSLTVSPGGTVTLTCGSSTG | |
| | | AVTSGNYPNWVQQKPGQAPRGLIGGTKFLAPGTPARFSGSLLGGKAALTLSGVQPEDEAEYYC | |
| | | VLWYSNRWVEGGGIKLTVLGGGGSQRFVIGHFGGLYPANGHHHHHH | |
| 600. | CH19_8-F6xI2C6-CH-FcB- | QRFCTGHFGGLHPCNGGGGGSQVQLVESGGGVVQPGRSLRLSCVASGFTFRNYAMHWVRQAPG | |
| | LY | KGLEWVAVISYSGNNKYYASSVKGRFTISRDNSKNTLYLQLNSLRAEDTAVYYCAREFYYDST | |
| | | GYDYSTPGDYWGQGTLVTVSSGGGGSGGGGSGGGGSDIQMTQSPSSLSASVGDRVTITCRASQ | |
| | | SISSYLNWYQQKPGKAPKLLIYDASSLQSGVPSRFSGSGSGTEFTLTISSLQAEDVAVYYCQQ | |
| | | YYSTPLIFGGGTKVDIKSGGGGSEVQLVESGGGLVQPGGSLKLSCAASGFTFNKYAMNWVRQA | |
| | | PGKGLEWVARIRSKYNNYATYYADSVKDRFTISRDDSKNTAYLQMNNLKTEDTAVYYCVRHGN | |
| | | FGNSYISYWAYWGQGTLVTVSSGGGGSGGGGSGGGGSQTVVTQEPSLIVSPGGIVTLICGSST | |
| | | GAVTSGNYPNWVQQKPGQAPRGLIGGTKFLAPGTPARFSGSLLGGKAALTLSGVQPEDEAEYY | |
| | | CVLWYSNRWVFGGGTKLTVLGGGGSQRFVTGHFGGLYPANGHHHHHH | |
| 601. | CH19_0-G9xI2C6-CH-FcB- | QRFCTGHFGGLHPCNGGGGGSQVQLVESGGGVVQPGRSLRLSCAASGFTFRNYAMHWVRQAPG | |
| | LY | KGLEWVAGISYSGTNKYYASSVKGRFTISRDNSKNTLYLQLNSLRAEDTAVYYCAREFYYDST | |
| | | GYDYSTPGDYWGQGTLVTVSSGGGGSGGGGSGGGGSDIQMTQSPSSLSASVGDRVTITCQASQ | |
| | | DISNYLNWYQQKPGKAPKLLIYDASNLETGVPSRFSGSGSGTEFTLTISSLQPEDIATYYCQQ | |
| | | YDNLPLIFGGGTKVDIKSGGGGSEVQLVESGGGLVQPGGSLKLSCAASGFTFNKYAMNWVRQA | |
| | | PGKGLEWVARIRSKYNNYATYYADSVKDRFTISRDDSKNTAYLQMNNLKTEDTAVYYCVRHGN | |
| | | FGNSYISYWAYWGQGTLVTVSSGGGGSGGGGSGGGGSQTVVTQEPSLTVSPGGTVTLTCGSST | |
| | | GAVTSGNYPNWVQQKPGQAPRGLIGGTKFLAPGTPARFSGSLLGGKAALTLSGVQPEDEAEYY | |
| | | CVLWYSNRWVFGGGTKLTVLGGGGSQRFVTGHFGGLYPANGHHHHHH | |
| 602. | CH19_1-E11xI2C6-CH- | QRFCTGHFGGLHPCNGGGGGSQVQLVESGGGVVQPGRSLRLSCVASGFTFRNYAMHWVRQAPG | |
| | FcB-LY | KGLEWVAVISYSGNNKYYASSVKGRFTISRDNSKNTLFLQLNSLRAEDTAVYYCAREFYYDST | |
| | | GYDYSTPGNYWGQGTLVTVSSGGGGSGGGGSGGGGSDIQMTQSPSSLSASVGDRVTITCQASQ | |
| | | DISNYLNWYQQKPGKAPKLLIYDASNLEIGVPSRFSGSGSGTDFIFTISSLQPEDIATYYCQQ | |
| | | YVNLPLIFGGGTKLEIKSGGGGSEVQLVESGGGLVQPGGSLKLSCAASGFTFNKYAMNWVRQA | |
| | | PGKGLEWVARIRSKYNNYATYYADSVKDRFTISRDDSKNTAYLQMNNLKTEDTAVYYCVRHGN | |
| | | FGNSYISYWAYWGQGTLVTVSSGGGGSGGGGSGGGGSQTVVTQEPSLTVSPGGTVTLTCGSST | |
| | | GAVTSGNYPNWVQQKPGQAPRGLIGGTKFLAPGTPARFSGSLLGGKAALTLSGVQPEDEAEYY | |
| | | CVLWYSNRWVFGGGTKLTVLGGGGSQRFVTGHFGGLYPANGHHHHHH | |
| 603. | CH19_0-F5xI2C6-CH-FcB- | QRFCIGHFGGLHPCNGGGGGSQVQLVESGGGVVQPGRSLRLSCAASGFTFSSYGMQWVRQAPG | |
| | LY | KGLEWVAVIWYSGSNKYYASSVKGRFTISRDNSKNTLYLQMNSLRAEDTAVYYCARDGYPIFY | |
| | | RYYGMDVWGQGTTVTVSSGGGGSGGGGSGGGGSDIQMTQSPSSLSASVGDRVTITCRASQGIS | |
| | | NYLAWYQQKPGKVPKLLIYAASTLQSGVPSRFSGSGSGTDFTLTISSLQPEDVATYYCQKYNS | |
| | | APLTFGGGTKVEIKSGGGGSEVQLVESGGGLVQPGGSLKLSCAASGFTFNKYAMNWVRQAPGK | |
| | | GLEWVARIRSKYNNYATYYADSVKDRFTISRDDSKNTAYLQMNNLKTEDTAVYYCVRHGNFGN | |
| | | SYISYWAYWGQGTLVTVSSGGGGSGGGGSGGGGSQTVVTQEPSLTVSPGGTVTLTCGSSTGAV | |
| | | TSGNYPNWVQQKPGQAPRGLIGGTKFLAPGTPARFSGSLLGGKAALTLSGVQPEDEAEYYCVL | |
| | | WYSNRWVFGGGTKLTVLGGGGSQRFVTGHFGGLYPANGHHHHHH | |
| 604. | CH19_1-E1xI2C6-CH-FcB- | QRFCIGHFGGLHPCNGGGGGSQVQLVESGGGVVQPGRSLRLSCAASGFTFSSYGMHWVRQAPG | |
| | LY | KGLEWVAVISYSGSNKYYASSVKGRFTISRDNSKNTLYLQMNSLRAEDTAVYYCARDGYPIFY | |
| | | RYYGMDVWGQGTIVIVSSGGGGSGGGGSGGGGSEIVLIQSPGILSLSPGERAILSCRASQSVS | |
| | | SSYLAWYQQKPGQAPRLLIYGASSRATGIPDRFSGSGSGTDFTLIISRLEPEDLAVYYCQQYG | |
| | | TSPLTFGGGTKLEIKSGGGGSEVQLVESGGGLVQPGGSLKLSCAASGFTFNKYAMNWVRQAPG | |
| | | KGLEWVARIRSKYNNYATYYADSVKDRFTSRDDSKNTAYLQMNNLKTEDTAVYYCVRHGNFG | |
| | | NSYISYWAYWGQGTLVTVSSGGGGSGGGGSGGGGSQTVVTQEPSLTVSPGGTVTLTCGSSTGA | |
| | | VTSGNYPNWVQQKPGQAPRGLIGGTKFLAPGTPARFSGSLLGGKAALTLSGVQPEDEAEYYCV | |
| | | LWYSNRWVFGGGTKLTVLGGGGSQRFVTGHFGGLYPANGHHHHHH | |
| 605. | CH19_1-E6xI2C6-CH-FcB- | QRFCIGHFGGLHPCNGGGGGSQVQLVESGGGVVQPGRSLRLSCAASGFTFSSFGMHWVRQAPG | |
| | LY | KGLEWVAFIWYSGSNKYYASSVKGRVTISRDNSKNTLYLQMNSLRAEDTAVYYCARDGYPIFY | |
| | | YYYGMDVWGQGTTVTVSSGGGGSGGGGSGGGGSEIVLTQSPGTLSLSPGERATLSCRASQSVS | |
| | | SSYLAWYQQKPGQAPRLLIYGASSRATGIPDRFSGSGSGTDFTLIISRLEPEDFAVYYCQQYG | |
| | | SSPFTFGPGTRLEIKSGGGGSEVQLVESGGGLVQPGGSLKLSCAASGFTFNKYAMNWVRQAPG | |
| | | KGLEWVARIRSKYNNYATYYADSVKDRFTISRDDSKNTAYLQMNNLKTEDTAVYYCVRHGNFG | |
| | | NSYISYWAYWGQGTLVTVSSGGGGSGGGGSGGGGSQTVVTQEPSLTVSPGGTVTLTCGSSTGA | |
| | | VTSGNYPNWVQQKPGQAPRGLIGGTKFLAPGTPARFSGSLLGGKAALTLSGVQPEDEAEYYCV | |
| | | LWYSNRWVEGGGIKLTVLGGGGSQRFVTGHFGGLYPANGHHHHHH | |
| 606. | CH19_2G6_302xI2C6-LH- | QRFVTGHFGGLHPANGGGGGSQVQLVESGGGVVQPGGSLRLSCAASGFTFSSYGMHWVRQAPG | |
| | FcB-CH-156 | KGLEWVAFIWYDGSNKYYADSVKDRFTISRDNSKNTLYLQMNSLRAEDTAVYYCARRAGIIGT | |
| | | IGYYYGMDVWGQGTTVTVSSGGGGSGGGGSGGGGSSYELTQPPSVSVSPGQTASITCSGDRLG | |
| | | EKYTSWYQQRPGQSPLLVIYQDTKRPSGIPERFSGSNSGNTATLIISGTQAMDEADYYCQAWE | |
| | | SSTVVFGGGTKLIVLSGGGGSEVQLVESGGGLVQPGGSLKLSCAASGFTENKYAMNWVRQAPG | |
| | | KGLEWVARIRSKYNNYATYYADSVKDRFTISRDDSKNTAYLQMNNLKTEDTAVYYCVRHGNFG | |
| | | NSYISYWAYWGQGTLVTVSSGGGGSGGGGSGGGGSQTVVTQEPSLTVSPGGIVTLICGSSTGA | |
| | | VTSGNYPNWVQQKPGQAPRGLIGGTKFLAPGTPARFSGSLLGGKAALTLSGVQPEDEAEYYCV | |
| | | LWYSNRWVFGGGTKLTVLGGGGSQRFCTGHFGGLHPCNGGGGGSGGGSRDWDFDVFGGGTPVG | |
| | | GHHHHHH | |
| 607. | CH19_2G6_302xI2C6-LH- | QRFVTGHFGGLHPANGGGGGSQVQLVESGGGVVQPGGSLRLSCAASGFTFSSYGMHWVRQAPG | |
| | FcB-LH-156 | KGLEWVAFIWYDGSNKYYADSVKDRFTISRDNSKNTLYLQMNSLRAEDTAVYYCARRAGIIGT | |
| | | IGYYYGMDVWGQGTTVTVSSGGGGSGGGGSGGGGSSYELTQPPSVSVSPGQTASITCSGDRLG | |
| | | EKYTSWYQQRPGQSPLLVIYQDTKRPSGIPERFSGSNSGNTATLIISGTQAMDEADYYCQAWE | |
| | | SSTVVFGGGTKLTVLSGGGGSEVQLVESGGGLVQPGGSLKLSCAASGFTFNKYAMNWVRQAPG | |
| | | KGLEWVARIRSKYNNYATYYADSVKDRFTISRDDSKNTAYLQMNNLKTEDTAVYYCVRHGNFG | |
| | | NSYISYWAYWGQGTLVTVSSGGGGSGGGGSGGGGSQTVVTQEPSLTVSPGGTVTLTCGSSTGA | |
| | | VTSGNYPNWVQQKPGQAPRGLIGGTKFLAPGTPARFSGSLLGGKAALTLSGVQPEDEAEYYCV | |
| | | LWYSNRWVFGGGTKLTVLGGGGSQRFVTGHFGGLHPANGGGGGSGGGSRDWDFDVFGGGTPVG | |
| | | GHHHHHH | |
| 608. | CH19_2G6_302xI2C6-LY- | QRFVTGHFGGLYPANGGGGGSQVQLVESGGGVVQPGGSLRLSCAASGFTFSSYGMHWVRQAPG | |
| | FcB-LH-156 | KGLEWVAFIWYDGSNKYYADSVKDRFTISRDNSKNTLYLQMNSLRAEDTAVYYCARRAGIIGT | |
| | | IGYYYGMDVWGQGTTVTVSSGGGGSGGGGSGGGGSSYELTQPPSVSVSPGQTASITCSGDRLG | |
| | | EKYTSWYQQRPGQSPLLVIYQDTKRPSGIPERFSGSNSGNTATLIISGTQAMDEADYYCQAWE | |
| | | SSTVVFGGGTKLIVLSGGGGSEVQLVESGGGLVQPGGSLKLSCAASGFTFNKYAMNWVRQAPG | |
| | | KGLEWVARIRSKYNNYATYYADSVKDRFTISRDDSKNTAYLQMNNLKTEDTAVYYCVRHGNFG | |
| | | NSYISYWAYWGQGTLVTVSSGGGGSGGGGSGGGGSQTVVTQEPSLTVSPGGTVTLTCGSSTGA | |
| | | VTSGNYPNWVQQKPGQAPRGLIGGTKFLAPGTPARFSGSLLGGKAALTLSGVQPEDEAEYYCV | |
| | | LWYSNRWVFGGGTKLTVLGGGGSQRFVTGHFGGLHPANGGGGGSGGGSRDWDFDVFGGGTPVG | |
| | | GHHHHHH | |
| 609. | Albumin binding peptide | RDWDFDVFGGGTPVGG | |
| 610. | Human CD3 E extracellular | QDGNEEMGGITQTPYKVSISGTTVILTCPQYPGSEILWQHNDKNIGGDEDDKNIGSDEDHLSL | |
| | domain | KEFSELEQSGYYVCYPRGSKPEDANFYLYLRARVCENCMEMD | |
| 611. | Human Cadherin-19 | MNCYLLLRFMLGIPLLWPCLGATENSQTKKVKQPVRSHLRVKRGWVWNQFFVPEEMNTTSHHIGQLRSDLDNGNNS | |
| | | FQYKLLGAGAGSTFIIDERTGDIYAIQKLDREERSLYILRAQVIDIATGRAVEPESEFVIKVSDINDNEPKFLDEP | |
| | | YEAIVPEMSPEGTLVIQVTASDADDPSSGNNARLLYSLLQGQPYFSVEPTTGVIRISSKMDRELQDEYWVIIQAKD | |
| | | MIGQPGALSGTTSVLIKLSDVNDNKPIFKESLYRLTVSESAPTGTSIGTIMAYDNDIGENAEMDYSIEEDDSQTFD | |
| | | IITNHETQEGIVILKKKVDFEHQNHYGIRAKVKNHHVPEQLMKYHTEASTTFIKIQVEDVDEPPLFLLPYYVFEVF | |
| | | EETPQGSFVGVVSATDPDNRKSPIRYSITRSKVFNINDNGTITTSNSLDREISAWYNLSITATEKYNIEQISSIPL | |
| | | YVQVLNINDHAPEFSQYYETYVCENAGSGQVIQTISAVDRDESIEEHHFYFNLSVEDTNNSSFTIIDNQDNTAVIL | |
| | | TNRTGFNLQEEPVFYISILIADNGIPSLTSTNTLTIHVCDCGDSGSTQTCQYQELVLSMGFKTEVIIAILICIMII | |
| | | FGFIFLTLGLKQRRKQILFPEKSEDFRENIFQYDDEGGGEEDTEAFDIAELRSSTIMRERKTRKTTSAEIRSLYRQ | |
| | | SLQVGPDSAIFRKFILEKLEEANTDPCAPPFDSLQTYAFEGTGSLAGSLSSLESAVSDQDESYDYLNELGPRFKRL | |
| | | ACMFGSAVQSNN | |
| 612. | Cyno Cadherin-19 | MNCYLLLPFMLGIPLLWPCLGATENSQTKKVQQPVGSHLRVKRGWVWNQFFVPEEMNTTSHHVGRLRSDLDNGNNS | |
| | Macaca fascicularis | FQYKLLGAGAGSTFIIDERTGDIYAIEKLDREERSLYILRAQVIDITTGRAVEPESEFVIKVSDINDNEPKFLDEP | |
| | | YEAIVPEMSPEGTLVIQVTASDADDPSSGNNARLLYSLLQGQPYFSVEPTTGVIRISSKMDRELQDEYWVIIQAKD | |
| | | MIGQPGALSGTTSVLIKLSDVNDNKPIFKESLYRLTVSESAPTGTSIGTIMAYDNDIGENAEMDYSIEEDDSQTFD | |
| | | IITNHETQEGIVILKKKVNFEHQNHYGIRAKVKNHHVDEQLMKYHTEASTTFIKIQVEDVDEPPLFLLPYYIFEIF | |
| | | EETPQGSFVGVVSATDPDNRKSPIRYSITRSKVFNIDDNGTITTTNSLDREISAWYNLSITATEKYNIEQISSIPV | |
| | | YVQVLNINDHAPEFSQYYESYVCENAGSGQVIQTISAVDRDESIEEHHFYFNLSVEDTNSSSFTIIDNQDNTAVIL | |
| | | TNRTGFNLQEEPIFYISILIADNGIPSLTSTNTLTIHVCDCDDSGSTQTCQYQELMLSMGFKTEVIIAILICIMVI | |
| | | FGFIFLTLGLKQRRKQILFPEKSEDFRENIFRYDDEGGGEEDTEAFDVAALRSSTIMRERKTRKTTSAEIRSLYRQ | |
| | | SLQVGPDSAIFRKFILEKLEEADTDPCAPPFDSLQTYAFEGTGSLAGSLSSLESAVSDQDESYDYLNELGPRFKRL | |
| | | ACMFGSAVQSNN | |
| SEQ | | | |
| ID NO | Designation | Format | Sequence |
| 613. | CD33_E11xI2C6-LFcBY | VH | NYGMN |
| | | CDR1 | |
| 614. | CD33_E11xI2C6-LFcBY | VH | WINTYTGEPTYADKFQG |
| | | CDR2 | |
| 615. | CD33_E11xI2C6-LFcBY | VH | WSWSDGYYVYFDY |
| | | CDR3 | |
| 616. | CD33_E11xI2C6-LFcBY | VH | KSSQSVLDSSTNKNSLA |
| | | CDR1 | |
| 617. | CD33_E11xI2C6-LFcBY | VH | WASTRES |
| | | CDR2 | |
| 618. | CD33_E11xI2C6-LFcBY | VH | QQSAHFPIT |
| | | CDR3 | |
| 619. | CD33_E11xI2C6-LFcBY | VH | QVQLVQSGAEVKKPGESVKVSCKASGYTFTNYGMNWVKQAPGQGLEWMGWINTYTGEPTYAD |
| | | | KFQGRVTMTTDTSTSTAYMEIRNLGGDDTAVYYCARWSWSDGYYVYFDYWGQGTSVTVSS |
| 620. | CD33_E11xI2C6-LFcBY | VL | DIVMTQSPDSLTVSLGERTTINCKSSQSVLDSSTNKNSLAWYQQKPGQPPKLLLSWASTRES |
| | | | GIPDRFSGSGSGTDFTLTIDSPQPEDSATYYCQQSAHFPITFGQGTRLEIK |
| 621. | CD33_E11xI2C6-LFcBY | scFv | QVQLVQSGAEVKKPGESVKVSCKASGYTFTNYGMNWVKQAPGQGLEWMGWINTYTGEPTYAD |
| | | | KFQGRVTMTTDTSTSTAYMEIRNLGGDDTAVYYCARWSWSDGYYVYFDYWGQGTSVTVSSGG |
| | | | GGSGGGGSGGGGSDIVMTQSPDSLTVSLGERTTINCKSSQSVLDSSTNKNSLAWYQQKPGQP |
| | | | PKLLLSWASTRESGIPDRFSGSGSGTDFILTIDSPQPEDSATYYCQQSAHFPITFGQGIRLE |
| | | | IK |
| 622. | CD33_E11xI2C6-LFcBY | bispecific | QRFVTGHFGGLYPANGGGGGSQVQLVQSGAEVKKPGESVKVSCKASGYTFINYGMNWVKQAP |
| | | molecule | GQGLEWMGWINTYTGEPTYADKFQGRVIMITDTSTSTAYMEIRNLGGDDTAVYYCARWSWSD |
| | | | GYYVYFDYWGQGTSVTVSSGGGGSGGGGSGGGGSDIVMTQSPDSLTVSLGERTTINCKSSQS |
| | | | VLDSSINKNSLAWYQQKPGQPPKLLLSWASTRESGIPDRFSGSGSGTDFILTIDSPQPEDSA |
| | | | TYYCQQSAHFPITFGQGTRLEIKSGGGGSEVQLVESGGGLVQPGGSLKLSCAASGFTFNKYA |
| | | | MNWVRQAPGKGLEWVARIRSKYNNYATYYADSVKDRFTISRDDSKNTAYLQMNNLKTEDTAV |
| | | | YYCVRHGNFGNSYISYWAYWGQGTLVTVSSGGGGSGGGGSGGGGSQTVVTQEPSLTVSPGGT |
| | | | VTLICGSSTGAVISGNYPNWVQQKPGQAPRGLIGGTKFLAPGIPARFSGSLLGGKAALTLSG |
| | | | VQPEDEAEYYCVLWYSNRWVFGGGTKLTVLGGGGSQRFCTGHFGGLHPCNGHHHHHH |
| 623. | CD33_E11_CCxI2C6-_ | VH | NYGMN |
| | LFcBY | CDR1 | |
| 624. | CD33_E11_CCxI2C6-_ | VH | WINTYTGEPTYADKFQG |
| | LFcBY | CDR2 | |
| 625. | CD33_E11_CCxI2C6-_ | VH | WSWSDGYYVYFDY |
| | LFcBY | CDR3 | |
| 626. | CD33_E11_CCxI2C6-_ | VL | KSSQSVLDSSTNKNSLA |
| | LFcBY | CDR1 | |
| 627. | CD33_E11_CCxI2C6-_ | VL | WASTRES |
| | LFcBY | CDR2 | |
| 628. | CD33_E11_CCxI2C6-_ | VL | QQSAHFPIT |
| | LFcBY | CDR3 | |
| 629. | CD33_E11_CCxI2C6-_ | VH | QVQLVQSGAEVKKPGESVKVSCKASGYTFTNYGMNWVKQAPGQCLEWMGWINTYTGEPTYAD |
| | LFcBY | | KFQGRVTMTTDTSTSTAYMEIRNLGGDDTAVYYCARWSWSDGYYVYFDYWGQGTSVTVSS |
| 630. | CD33_E11_CCxI2C6-_ | VL | DIVMTQSPDSLTVSLGERTTINCKSSQSVLDSSTNKNSLAWYQQKPGQPPKLLLSWASTRES |
| | LFcBY | | GIPDRFSGSGSGTDFTLTIDSPQPEDSATYYCQQSAHFPITFGCGTRLEIK |
| 631. | CD33_E11_CCxI2C6-_ | scFv | QVQLVQSGAEVKKPGESVKVSCKASGYTFTNYGMNWVKQAPGQCLEWMGWINTYTGEPTYAD |
| | LFcBY | | KFQGRVTMTTDTSTSTAYMEIRNLGGDDTAVYYCARWSWSDGYYVYFDYWGQGTSVTVSSGG |
| | | | GGSGGGGSGGGGSDIVMTQSPDSLTVSLGERTTINCKSSQSVLDSSTNKNSLAWYQQKPGQP |
| | | | PKLLLSWASTRESGIPDRFSGSGSGTDFILTIDSPQPEDSATYYCQQSAHFPITFGCGIRLE |
| | | | IK |
| 632. | CD33_E11_CCxI2C6- | bispecific | QRFVTGHFGGLYPANGGGGGSQVQLVQSGAEVKKPGESVKVSCKASGYTFINYGMNWVKQAP |
| | LFcBY | molecule | GQCLEWMGWINTYTGEPTYADKFQGRVIMITDTSTSTAYMEIRNLGGDDTAVYYCARWSWSD |
| | | | GYYVYFDYWGQGTSVTVSSGGGGSGGGGSGGGGSDIVMTQSPDSLTVSLGERTTINCKSSQS |
| | | | VLDSSINKNSLAWYQQKPGQPPKLLLSWASTRESGIPDRFSGSGSGTDFILTIDSPQPEDSA |
| | | | TYYCQQSAHFPITFGCGTRLEIKSGGGGSEVQLVESGGGLVQPGGSLKLSCAASGFTFNKYA |
| | | | MNWVRQAPGKGLEWVARIRSKYNNYATYYADSVKDRFTISRDDSKNTAYLQMNNLKTEDTAV |
| | | | YYCVRHGNFGNSYISYWAYWGQGTLVTVSSGGGGSGGGGSGGGGSQTVVTQEPSLTVSPGGT |
| | | | VTLICGSSTGAVISGNYPNWVQQKPGQAPRGLIGGTKFLAPGIPARFSGSLLGGKAALTLSG |
| | | | VQPEDEAEYYCVLWYSNRWVFGGGTKLTVLGGGGSQRFCTGHFGGLHPCNGHHHHHH |
| 633. | CD33_E11xI2C6-CH- | VH | NYGMN |
| | FcB-LY | CDR1 | |
| 634. | CD33_E11xI2C6-CH- | VH | WINTYTGEPTYADKFQG |
| | FcB-LY | CDR2 | |
| 635. | CD33_E11xI2C6-CH- | VH | WSWSDGYYVYFDY |
| | FcB-LY | CDR3 | |
| 636. | CD33_E11xI2C6-CH- | VL | KSSQSVLDSSTNKNSLA |
| | FcB-LY | CDR1 | |
| 637. | CD33_E11xI2C6-CH- | VL | WASTRES |
| | FcB-LY | CDR2 | |
| 638. | CD33_El11xI2C6-CH- | VL | QQSAHFPIT |
| | FcB-LY | CDR3 | |
| 639. | CD33_E11xI2C6-CH- | VH | QVQLVQSGAEVKKPGESVKVSCKASGYTFTNYGMNWVKQAPGQGLEWMGWINTYTGEPTYAD |
| | FcB-LY | | KFQGRVTMTTDTSTSTAYMEIRNLGGDDTAVYYCARWSWSDGYYVYFDYWGQGTSVTVSS |
| 640. | CD33_E11xI2C6-CH- | VL | DIVMTQSPDSLTVSLGERTTINCKSSQSVLDSSTNKNSLAWYQQKPGQPPKLLLSWASTRES |
| | FcB-LY | | GIPDRFSGSGSGTDFTLTIDSPQPEDSATYYCQQSAHFPITFGQGTRLEIK |
| 641. | CD33_E11xI2C6-CH- | scFv | QVQLVQSGAEVKKPGESVKVSCKASGYTFTNYGMNWVKQAPGQGLEWMGWINTYTGEPTYAD |
| | FcB-LY | | KFQGRVTMTTDTSTSTAYMEIRNLGGDDTAVYYCARWSWSDGYYVYFDYWGQGTSVTVSSGG |
| | | | GGSGGGGSGGGGSDIVMTQSPDSLTVSLGERTTINCKSSQSVLDSSTNKNSLAWYQQKPGQP |
| | | | PKLLLSWASTRESGIPDRFSGSGSGTDFTLTIDSPQPEDSATYYCQQSAHFPITFGQGTRLE |
| | | | IK |
| 642. | CD33_E11xI2C6-CH- | bispecific | QRFCTGHFGGLHPCNGGGGGSQVQLVQSGAEVKKPGESVKVSCKASGYTFTNYGMNWVKQAP |
| | FcB-LY | molecule | GQGLEWMGWINTYTGEPIYADKFQGRVIMITDTSISTAYMEIRNLGGDDTAVYYCARWSWSD |
| | | | GYYVYFDYWGQGTSVIVSSGGGGSGGGGSGGGGSDIVMTQSPDSLIVSLGERTTINCKSSQS |
| | | | VLDSSTNKNSLAWYQQKPGQPPKLLLSWASTRESGIPDRFSGSGSGTDFTLTIDSPQPEDSA |
| | | | TYYCQQSAHFPITFGQGTRLEIKSGGGGSEVQLVESGGGLVQPGGSLKLSCAASGFTFNKYA |
| | | | MNWVRQAPGKGLEWVARIRSKYNNYATYYADSVKDRFTISRDDSKNTAYLQMNNLKTEDTAV |
| | | | YYCVRHGNFGNSYISYWAYWGQGTLVTVSSGGGGSGGGGSGGGGSQTVVTQEPSLTVSPGGT |
| | | | VTLTCGSSTGAVTSGNYPNWVQQKPGQAPRGLIGGTKFLAPGTPARFSGSLLGGKAALTLSG |
| | | | VQPEDEAEYYCVLWYSNRWVFGGGTKLTVLGGGGSQRFVTGHFGGLYPANGHHHHHH |
| 643. | CD33_E11_CCxI2C6- | VH | NYGMN |
| | CH-FcB-LY | CDR1 | |
| 644. | CD33_E11_CCxI2C6- | VH | WINTYTGEPTYADKFQG |
| | CH-FcB-LY | CDR2 | |
| 645. | CD33_E11_CCxI2C6- | VH | WSWSDGYYVYFDY |
| | CH-FcB-LY | CDR3 | |
| 646. | CD33_E11_CCxI2C6- | VL | KSSQSVLDSSTNKNSLA |
| | CH-FcB-LY | CDR1 | |
| 647. | CD33_E11_CCxI2C6- | VL | WASTRES |
| | CH-FcB-LY | CDR2 | |
| 648. | CD33_E11_CCxI2C6- | VL | QQSAHFPIT |
| | CH-FcB-LY | CDR3 | |
| 649. | CD33_E11_CCxI2C6- | VH | QVQLVQSGAEVKKPGESVKVSCKASGYTFTNYGMNWVKQAPGQCLEWMGWINTYTGEPTYAD |
| | CH-FcB-LY | | KFQGRVTMTTDTSTSTAYMEIRNLGGDDTAVYYCARWSWSDGYYVYFDYWGQGTSVTVSS |
| 650. | CD33_E11_CCxI2C6- | VL | DIVMTQSPDSLTVSLGERTTINCKSSQSVLDSSTNKNSLAWYQQKPGQPPKLLLSWASTRES |
| | CH-FcB-LY | | GIPDRFSGSGSGTDFTLTIDSPQPEDSATYYCQQSAHFPITFGCGTRLEIK |
| 651. | CD33_E11_CCxI2C6- | scFv | QVQLVQSGAEVKKPGESVKVSCKASGYTFTNYGMNWVKQAPGQCLEWMGWINTYTGEPTYAD |
| | CH-FcB-LY | | KFQGRVTMTTDTSTSTAYMEIRNLGGDDTAVYYCARWSWSDGYYVYFDYWGQGTSVTVSSGG |
| | | | GGSGGGGSGGGGSDIVMTQSPDSLTVSLGERTTINCKSSQSVLDSSTNKNSLAWYQQKPGQP |
| | | | PKLLLSWASTRESGIPDRFSGSGSGTDFILTIDSPQPEDSATYYCQQSAHFPITFGCGIRLE |
| | | | IK |
| 652. | CD33_E11_CCxI2C6- | bispecific | QRFCTGHFGGLHPCNGGGGGSQVQLVQSGAEVKKPGESVKVSCKASGYTFINYGMNWVKQAP |
| | CH-FcB-LY | molecule | GQCLEWMGWINTYTGEPTYADKFQGRVIMITDTSTSTAYMEIRNLGGDDTAVYYCARWSWSD |
| | | | GYYVYFDYWGQGTSVIVSSGGGGSGGGGSGGGGSDIVMTQSPDSLIVSLGERTTINCKSSQS |
| | | | VLDSSTNKNSLAWYQQKPGQPPKLLLSWASTRESGIPDRFSGSGSGTDFTLTIDSPQPEDSA |
| | | | TYYCQQSAHFPITFGCGIRLEIKSGGGGSEVQLVESGGGLVQPGGSLKLSCAASGFTFNKYA |
| | | | MNWVRQAPGKGLEWVARIRSKYNNYATYYADSVKDRFTISRDDSKNTAYLQMNNLKTEDTAV |
| | | | YYCVRHGNFGNSYISYWAYWGQGTLVTVSSGGGGSGGGGSGGGGSQTVVTQEPSLTVSPGGT |
| | | | VTLICGSSTGAVISGNYPNWVQQKPGQAPRGLIGGTKFLAPGIPARFSGSLLGGKAALTLSG |
| | | | VQPEDEAEYYCVLWYSNRWVFGGGTKLTVLGGGGSQRFVTGHFGGLYPANGHHHHHH |
| 653. | CD33_E11xI2C6- | VH | NYGMN |
| | LFcBY-156 | CDR1 | |
| 654. | CD33_E11xI2C6- | VH | WINTYTGEPTYADKFQG |
| | LFcBY-156 | CDR2 | |
| 655. | CD33_E11xI2C6- | VH | WSWSDGYYVYFDY |
| | LFcBY-156 | CDR3 | |
| 656. | CD33_E11xI2C6- | VL | KSSQSVLDSSTNKNSLA |
| | LFcBY-156 | CDR1 | |
| 657. | CD33_El1xI2C6- | VL | WASTRES |
| | LFcBY-156 | CDR2 | |
| 658. | CD33_E11xI2C6- | VL | QQSAHFPIT |
| | LFcBY-156 | CDR3 | |
| 659. | CD33_E11xI2C6- | VH | QVQLVQSGAEVKKPGESVKVSCKASGYTFTNYGMNWVKQAPGQGLEWMGWINTYTGEPTYAD |
| | LFcBY-156 | | KFQGRVTMTTDTSTSTAYMEIRNLGGDDTAVYYCARWSWSDGYYVYFDYWGQGTSVTVSS |
| 660. | CD33_E11xI2C6- | VL | DIVMTQSPDSLTVSLGERTTINCKSSQSVLDSSTNKNSLAWYQQKPGQPPKLLLSWASTRES |
| | LFcBY-156 | | GIPDRFSGSGSGTDFTLTIDSPQPEDSATYYCQQSAHFPITFGQGTRLEIK |
| 661. | CD33_E11xI2C6- | scFv | QVQLVQSGAEVKKPGESVKVSCKASGYTFTNYGMNWVKQAPGQGLEWMGWINTYTGEPTYAD |
| | LFcBY-156 | | KFQGRVTMTTDTSTSTAYMEIRNLGGDDTAVYYCARWSWSDGYYVYFDYWGQGTSVTVSSGG |
| | | | GGSGGGGSGGGGSDIVMTQSPDSLTVSLGERTTINCKSSQSVLDSSTNKNSLAWYQQKPGQP |
| | | | PKLLLSWASTRESGIPDRFSGSGSGTDFTLTIDSPQPEDSATYYCQQSAHFPITFGQGTRLE |
| | | | IK |
| 662. | CD33_E11xI2C6- | bispecific | QRFVTGHFGGLYPANGGGGGSQVQLVQSGAEVKKPGESVKVSCKASGYTFTNYGMNWVKQAP |
| | LFcBY-156 | molecule | GQGLEWMGWINTYTGEPIYADKFQGRVIMITDTSISTAYMEIRNLGGDDTAVYYCARWSWSD |
| | | | GYYVYFDYWGQGTSVIVSSGGGGSGGGGSGGGGSDIVMTQSPDSLIVSLGERTTINCKSSQS |
| | | | VLDSSTNKNSLAWYQQKPGQPPKLLLSWASTRESGIPDRFSGSGSGTDFTLTIDSPQPEDSA |
| | | | TYYCQQSAHFPITFGQGTRLEIKSGGGGSEVQLVESGGGLVQPGGSLKLSCAASGFTFNKYA |
| | | | MNWVRQAPGKGLEWVARIRSKYNNYATYYADSVKDRFTISRDDSKNTAYLQMNNLKTEDTAV |
| | | | YYCVRHGNFGNSYISYWAYWGQGTLVTVSSGGGGSGGGGSGGGGSQTVVTQEPSLTVSPGGT |
| | | | VTLTCGSSTGAVTSGNYPNWVQQKPGQAPRGLIGGTKFLAPGTPARFSGSLLGGKAALTLSG |
| | | | VQPEDEAEYYCVLWYSNRWVFGGGTKLTVLGGGGSQRFCTGHFGGLHPCNGGGGGSGGGSRD |
| | | | WDFDVFGGGTPVGGHHHHHH |
| 663. | CD33_E11CCxI2C6- | VH | NYGMN |
| | LFcBY-156 | CDR1 | |
| 664. | CD33_E11CCxI2C6- | VH | WINTYTGEPTYADKFQG |
| | LFcBY-156 | CDR2 | |
| 665. | CD33_E11CCxI2C6- | VH | WSWSDGYYVYFDY |
| | LFcBY-156 | CDR3 | |
| 666. | CD33_E11CCxI2C6- | VL | KSSQSVLDSSTNKNSLA |
| | LFcBY-156 | CDR1 | |
| 667. | CD33_E11CCxI2C6- | VL | WASTRES |
| | LFcBY-156 | CDR2 | |
| 668. | CD33_E11CCxI2C6- | VL | QQSAHFPIT |
| | LFcBY-156 | CDR3 | |
| 669. | CD33_E11CCxI2C6- | VH | QVQLVQSGAEVKKPGESVKVSCKASGYTFTNYGMNWVKQAPGQCLEWMGWINTYTGEPTYAD |
| | LFcBY-156 | | KFQGRVTMTTDTSTSTAYMEIRNLGGDDTAVYYCARWSWSDGYYVYFDYWGQGTSVTVSS |
| 670. | CD33_E11CCxI2C6- | VL | DIVMTQSPDSLTVSLGERTTINCKSSQSVLDSSTNKNSLAWYQQKPGQPPKLLLSWASTRES |
| | LFcBY-156 | | GIPDRFSGSGSGTDFTLTIDSPQPEDSATYYCQQSAHFPITFGCGTRLEIK |
| 671. | CD33_E11CCxI2C6- | scFv | QVQLVQSGAEVKKPGESVKVSCKASGYTFTNYGMNWVKQAPGQCLEWMGWINTYTGEPTYAD |
| | LFcBY-156 | | KFQGRVTMTTDTSTSTAYMEIRNLGGDDTAVYYCARWSWSDGYYVYFDYWGQGTSVTVSSGG |
| | | | GGSGGGGSGGGGSDIVMTQSPDSLTVSLGERTTINCKSSQSVLDSSTNKNSLAWYQQKPGQP |
| | | | PKLLLSWASTRESGIPDRFSGSGSGTDFTLTIDSPQPEDSATYYCQQSAHFPITFGCGTRLE |
| | | | IK |
| 672. | CD33_E11_CCxI2C6- | bispecific | QRFVTGHFGGLYPANGGGGGSQVQLVQSGAEVKKPGESVKVSCKASGYTFTNYGMNWVKQAP |
| | LFcBY-156 | molecule | GQCLEWMGWINTYTGEPIYADKFQGRVIMITDTSISTAYMEIRNLGGDDTAVYYCARWSWSD |
| | | | GYYVYFDYWGQGTSVIVSSGGGGSGGGGSGGGGSDIVMTQSPDSLIVSLGERTTINCKSSQS |
| | | | VLDSSTNKNSLAWYQQKPGQPPKLLLSWASTRESGIPDRFSGSGSGTDFTLTIDSPQPEDSA |
| | | | TYYCQQSAHFPITFGCGTRLEIKSGGGGSEVQLVESGGGLVQPGGSLKLSCAASGFTFNKYA |
| | | | MNWVRQAPGKGLEWVARIRSKYNNYATYYADSVKDRFTISRDDSKNTAYLQMNNLKTEDTAV |
| | | | YYCVRHGNFGNSYISYWAYWGQGTLVTVSSGGGGSGGGGSGGGGSQTVVTQEPSLTVSPGGT |
| | | | VTLICGSSTGAVISGNYPNWVQQKPGQAPRGLIGGTKFLAPGIPARFSGSLLGGKAALILSG |
| | | | VQPEDEAEYYCVLWYSNRWVFGGGTKLTVLGGGGSQRFCTGHFGGLHPCNGGGGGSGGGSRD |
| | | | WDFDVFGGGTPVGGHHHHHH |
| 673. | CD33_E11xI2C6-CH- | VH | NYGMN |
| | FcB-LY-156 | CDR1 | |
| 674. | CD33_E11xI2C6-CH- | VH | WINTYTGEPTYADKFQG |
| | FcB-LY-156 | CDR2 | |
| 675. | CD33_E11xI2C6-CH- | VH | WSWSDGYYVYFDY |
| | FcB-LY-156 | CDR3 | |
| 676. | CD33_E11xI2C6-CH- | VL | KSSQSVLDSSTNKNSLA |
| | FcB-LY-156 | CDR1 | |
| 677. | CD33_E11xI2C6-CH- | VL | WASTRES |
| | FcB-LY-156 | CDR2 | |
| 678. | CD33_E11xI2C6-CH- | VL | QQSAHFPIT |
| | FcB-LY-156 | CDR3 | |
| 679. | CD33_E11xI2C6-CH- | VH | QVQLVQSGAEVKKPGESVKVSCKASGYTFTNYGMNWVKQAPGQGLEWMGWINTYTGEPTYAD |
| | FcB-LY-156 | | KFQGRVTMTTDTSTSTAYMEIRNLGGDDTAVYYCARWSWSDGYYVYFDYWGQGTSVTVSS |
| 680. | CD33_E11xI2C6-CH- | VL | DIVMTQSPDSLTVSLGERTTINCKSSQSVLDSSTNKNSLAWYQQKPGQPPKLLLSWASTRES |
| | FcB-LY-156 | | GIPDRFSGSGSGTDFTLTIDSPQPEDSATYYCQQSAHFPITFGQGTRLEIK |
| 681. | CD33_E11xI2C6-CH- | scFv | QVQLVQSGAEVKKPGESVKVSCKASGYTFTNYGMNWVKQAPGQGLEWMGWINTYTGEPTYAD |
| | FcB-LY-156 | | KFQGRVTMTTDTSTSTAYMEIRNLGGDDTAVYYCARWSWSDGYYVYFDYWGQGTSVTVSSGG |
| | | | GGSGGGGSGGGGSDIVMTQSPDSLTVSLGERTTINCKSSQSVLDSSTNKNSLAWYQQKPGQP |
| | | | PKLLLSWASTRESGIPDRFSGSGSGTDFTLTIDSPQPEDSATYYCQQSAHFPITFGQGTRLE |
| | | | IK |
| 682. | CD33_E11xI2C6-CH- | bispecific | QRFCTGHFGGLHPCNGGGGGSQVQLVQSGAEVKKPGESVKVSCKASGYTFTNYGMNWVKQAP |
| | FcB-LY-156 | molecule | GQGLEWMGWINTYTGEPIYADKFQGRVIMITDTSISTAYMEIRNLGGDDTAVYYCARWSWSD |
| | | | GYYVYFDYWGQGTSVTVSSGGGGSGGGGSGGGGSDIVMTQSPDSLTVSLGERTTINCKSSQS |
| | | | VLDSSTNKNSLAWYQQKPGQPPKLLLSWASTRESGIPDRFSGSGSGTDFTLTIDSPQPEDSA |
| | | | TYYCQQSAHFPITFGQGTRLEIKSGGGGSEVQLVESGGGLVQPGGSLKLSCAASGFTFNKYA |
| | | | MNWVRQAPGKGLEWVARIRSKYNNYATYYADSVKDRFTISRDDSKNTAYLQMNNLKTEDTAV |
| | | | YYCVRHGNFGNSYISYWAYWGQGTLVTVSSGGGGSGGGGSGGGGSQTVVTQEPSLTVSPGGT |
| | | | VTLTCGSSTGAVTSGNYPNWVQQKPGQAPRGLIGGTKFLAPGTPARFSGSLLGGKAALTLSG |
| | | | VQPEDEAEYYCVLWYSNRWVFGGGTKLTVLGGGGSQRFVTGHFGGLYPANGGGGGSGGGSRD |
| | | | WDFDVFGGGTPVGGHHHHHH |
| 683. | CD33_E11CCxI2C6- | VH | NYGMN |
| | CH-FcB-LY-156 | CDR1 | |
| 684. | CD33_E11CCxI2C6- | VH | WINTYTGEPTYADKFQG |
| | CH-FcB-LY-156 | CDR2 | |
| 685. | CD33_E11CCxI2C6- | VH | WSWSDGYYVYFDY |
| | CH-FcB-LY-156 | CDR3 | |
| 686. | CD33_E11CCxI2C6- | VL | KSSQSVLDSSTNKNSLA |
| | CH-FcB-LY-156 | CDR1 | |
| 687. | CD33_E11CCxI2C6- | VL | WASTRES |
| | CH-FcB-LY-156 | CDR2 | |
| 688. | CD33_E11CCxI2C6- | VL | QQSAHFPIT |
| | CH-FcB-LY-156 | CDR3 | |
| 689. | CD33_E11CCxI2C6- | VH | QVQLVQSGAEVKKPGESVKVSCKASGYTFTNYGMNWVKQAPGQCLEWMGWINTYTGEPTYAD |
| | CH-FcB-LY-156 | | KFQGRVTMTTDTSTSTAYMEIRNLGGDDTAVYYCARWSWSDGYYVYFDYWGQGTSVTVSS |
| 690. | CD33_E11CCxI2C6- | VL | DIVMTQSPDSLTVSLGERTTINCKSSQSVLDSSTNKNSLAWYQQKPGQPPKLLLSWASTRES |
| | CH-FcB-LY-156 | | GIPDRFSGSGSGTDFTLTIDSPQPEDSATYYCQQSAHFPITFGCGTRLEIK |
| 691. | CD33_E11CCxI2C6- | scFv | QVQLVQSGAEVKKPGESVKVSCKASGYTFTNYGMNWVKQAPGQCLEWMGWINTYTGEPTYAD |
| | CH-FcB-LY-156 | | KFQGRVTMTTDTSTSTAYMEIRNLGGDDTAVYYCARWSWSDGYYVYFDYWGQGTSVTVSSGG |
| | | | GGSGGGGSGGGGSDIVMTQSPDSLTVSLGERTTINCKSSQSVLDSSTNKNSLAWYQQKPGQP |
| | | | PKLLLSWASTRESGIPDRFSGSGSGTDFILTIDSPQPEDSATYYCQQSAHFPITFGCGIRLE |
| | | | IK |
| 692. | CD33_E11CCxI2C6- | bispecific | QRFCTGHFGGLHPCNGGGGGSQVQLVQSGAEVKKPGESVKVSCKASGYTFINYGMNWVKQAP |
| | CH-FcB-LY-156 | molecule | GQCLEWMGWINTYTGEPTYADKFQGRVIMITDTSTSTAYMEIRNLGGDDTAVYYCARWSWSD |
| | | | GYYVYFDYWGQGTSVTVSSGGGGSGGGGSGGGGSDIVMTQSPDSLTVSLGERTTINCKSSQS |
| | | | VLDSSTNKNSLAWYQQKPGQPPKLLLSWASTRESGIPDRFSGSGSGTDFTLTIDSPQPEDSA |
| | | | TYYCQQSAHFPITFGCGIRLEIKSGGGGSEVQLVESGGGLVQPGGSLKLSCAASGFTFNKYA |
| | | | MNWVRQAPGKGLEWVARIRSKYNNYATYYADSVKDRFTISRDDSKNTAYLQMNNLKTEDTAV |
| | | | YYCVRHGNFGNSYISYWAYWGQGTLVTVSSGGGGSGGGGSGGGGSQTVVTQEPSLTVSPGGT |
| | | | VTLICGSSTGAVISGNYPNWVQQKPGQAPRGLIGGTKFLAPGIPARFSGSLLGGKAALTLSG |
| | | | VQPEDEAEYYCVLWYSNRWVFGGGTKLTVLGGGGSQRFVTGHFGGLYPANGGGGGSGGGSRD |
| | | | WDFDVFGGGTPVGGHHHHHH |

1. A bispecific single chain antibody construct binding to a target cell surface antigen via a first binding domain and to the T cell surface antigen CD3 via a second binding domain, the construct comprising two FcRn binding peptides, wherein:
(a) a first FcRn binding peptide comprises the amino acid sequence QRFVTGHFGGLX₁PANG (SEQ ID NO: 1) whereas X₁ is Y or H; and
(b) a second FcRn binding peptide comprises the amino acid sequence TGHFGGLHP (SEQ ID NO: 4);
wherein the bispecific single chain antibody construct does not have an amino acid sequence as depicted in SEQ ID NOs: 132-135.

2. The antibody construct according to claim 1, wherein the second FcRn binding peptide comprises the amino acid sequence QRFVTGHFGGLHPANG (SEQ ID NO: 3) or QRFCTGHFGGLHPCNG (SEQ ID NO: 5).

3. The antibody construct according to claim 1, comprising an FcRn binding peptide at the N-terminus and an FcRn binding peptide at the C-terminus selected from the group consisting of:
(a) the FcRn binding peptide at the N-terminus comprises the amino acid sequence QRFVTGHFGGLYPANG (SEQ ID NO: 2) and at the C-terminus comprises the amino acid sequence QRFCTGHFGGLHPCNG (SEQ ID NO: 5);
(b) the FcRn binding peptide at the N-terminus comprises the amino acid sequence QRFVTGHFGGLYPANG (SEQ ID NO: 2) and at the C-terminus comprises the amino acid sequence QRFVTGHFGGLHPANG (SEQ ID NO: 3);
(c) the FcRn binding peptide at the N-terminus comprises the amino acid sequence QRFVTGHFGGLHPANG (SEQ ID NO: 3) and at the C-terminus comprises the amino acid sequence QRFCTGHFGGLHPCNG (SEQ ID NO: 5);
(d) the FcRn binding peptide at the N-terminus comprises the amino acid sequence QRFVTGHFGGLHPANG (SEQ ID NO: 3) and at the C-terminus comprises the amino acid sequence QRFVTGHFGGLHPANG (SEQ ID NO: 3);
(e) the FcRn binding peptide at the N-terminus comprises the amino acid sequence QRFCTGHFGGLHPCNG (SEQ ID NO: 5) and at the C-terminus comprises the amino acid sequence QRFVTGHFGGLYPANG (SEQ ID NO: 2); and
(f) the FcRn binding peptide at the N-terminus comprises the amino acid sequence QRFCTGHFGGLHPCNG (SEQ ID NO: 5) and at the C-terminus comprises the amino acid sequence QRFVTGHFGGLHPANG (SEQ ID NO: 3).

4. The antibody construct according to claim 1, wherein the FcRn binding peptides are linked to the antibody construct via one or more peptide linker(s).

5. The antibody construct according to claim 4, wherein the peptide linker has the amino acid sequence (GGGGS)ₙ (SEQ ID NO: 6)ₙ wherein n is an integer in the range of 1 to 5.

6. The antibody construct according to claim 1, wherein the construct comprises a further domain binding to serum albumin.

7. The antibody construct according to claim 1, wherein the target cell surface antigen is a tumor antigen.

8. The antibody construct according to claim 7, wherein the tumor antigen is selected from the group of consisting of CDH19, mesothelin (MSLN), DLL3, FLT3, CD33, CD20 and EGFRvIII.

9. The antibody construct according to claim 1, wherein the second binding domain binds to an epitope of human and Callithrix jacchus, Saguinus oedipus or Saimiri sciureus CD3ε chain, wherein the epitope is part of an amino acid sequence comprised in the group consisting of SEQ ID NOs: 7, 8, 9, and 10 and comprises at least the amino acid sequence Gln-Asp-Gly-Asn-Glu (SEQ ID NO: 11).

10. The antibody construct according to claim 9, wherein the second binding domain comprises a VL region having CDR-L1-L3 and a VH region having CDR-H1-H3 selected from the group consisting of:
(a) CDR-L1-L3 as depicted in SEQ ID NOs: 12-14 and CDR-H1-H3 as depicted in SEQ ID NOs: 15-17;
(b) CDR-L1-L3 as depicted in SEQ ID NOs: 24-26 and CDR-H1-H3 as depicted in SEQ ID NOs: 27-29;
(c) CDR-L1-L3 as depicted in SEQ ID NOs: 36-38 and CDR-H1-H3 as depicted in SEQ ID NOs: 39-41;
(d) CDR-L1-L3 as depicted in SEQ ID NOs: 48-50 and CDR-H1-H3 as depicted in SEQ ID NOs: 51-53;
(e) CDR-L1-L3 as depicted in SEQ ID NOs: 60-62 and CDR-H1-H3 as depicted in SEQ ID NOs: 63-65;
(f) CDR-L1-L3 as depicted in SEQ ID NOs: 72-74 and CDR-H1-H3 as depicted in SEQ ID NOs: 75-77;
(g) CDR-L1-L3 as depicted in SEQ ID NOs: 84-86 and CDR-H1-H3 as depicted in SEQ ID NOs: 87-89;
(h) CDR-L1-L3 as depicted in SEQ ID NOs: 96-98 and CDR-H1-H3 as depicted in SEQ ID NOs: 99-101;
(i) CDR-L1-L3 as depicted in SEQ ID NOs: 108-110 and CDR-H1-H3 as depicted in SEQ ID NOs: 111-113;
(j) CDR-L1-L3 as depicted in SEQ ID NOs: 120-122 and CDR-H1-H3 as depicted in SEQ ID NOs: 123-125;
(k) CDR-L1-L3 as depicted in SEQ ID NOs: 616-618 and CDR-H1-H3 as depicted in SEQ ID NOs: 613-615;
(l) CDR-L1-L3 as depicted in SEQ ID NOs: 626-628 and CDR-H1-H3 as depicted in SEQ ID NOs: 623-625;
(m) CDR-L1-L3 as depicted in SEQ ID NOs: 636-638 and CDR-H1-H3 as depicted in SEQ ID NOs: 633-635;
(n) CDR-L1-L3 as depicted in SEQ ID NOs: 646-648 and CDR-H1-H3 as depicted in SEQ ID NOs: 643-645;
(o) CDR-L1-L3 as depicted in SEQ ID NOs: 656-658 and CDR-H1-H3 as depicted in SEQ ID NOs: 653-655;
(p) CDR-L1-L3 as depicted in SEQ ID NOs: 666-668 and CDR-H1-H3 as depicted in SEQ ID NOs: 663-665;
(q) CDR-L1-L3 as depicted in SEQ ID NOs: 676-678 and CDR-H1-H3 as depicted in SEQ ID NOs: 673-675; and
(r) CDR-L1-L3 as depicted in SEQ ID NOs: 686-688 and CDR-H1-H3 as depicted in SEQ ID NOs: 683-685.

11. The antibody construct according to claim 9, wherein the second binding domain comprises pairs of VH and VL chains selected from the group consisting of:
(a) a VH-chain as depicted in SEQ ID NO: 18 and a VL-chain as depicted in SEQ ID NO: 20;
(b) a VH-chain as depicted in SEQ ID NO: 30 and a VL-chain as depicted in SEQ ID NO: 32;
(c) a VH-chain as depicted in SEQ ID NO: 42 and a VL-chain as depicted in SEQ ID NO: 44;
(d) a VH-chain as depicted in SEQ ID NO: 54 and a VL-chain as depicted in SEQ ID NO: 56;
(e) a VH-chain as depicted in SEQ ID NO: 66 and a VL-chain as depicted in SEQ ID NO: 68;
(f) a VH-chain as depicted in SEQ ID NO: 78 and a VL-chain as depicted in SEQ ID NO: 80;
(g) a VH-chain as depicted in SEQ ID NO: 90 and a VL-chain as depicted in SEQ ID NO: 92;
(h) a VH-chain as depicted in SEQ ID NO: 102 and a VL-chain as depicted in SEQ ID NO: 104;
(i) a VH-chain as depicted in SEQ ID NO: 114 and a VL-chain as depicted in SEQ ID NO: 116;
(j) a VH-chain as depicted in SEQ ID NO: 126 and a VL-chain as depicted in SEQ ID NO: 128;
(k) a VH-chain as depicted in SEQ ID NO: 619 and a VL-chain as depicted in SEQ ID NO: 620;
(l) a VH-chain as depicted in SEQ ID NO: 629 and a VL-chain as depicted in SEQ ID NO: 630;
(m) a VH-chain as depicted in SEQ ID NO: 639 and a VL-chain as depicted in SEQ ID NO: 640;
(n) a VH-chain as depicted in SEQ ID NO: 649 and a VL-chain as depicted in SEQ ID NO: 650;
(o) a VH-chain as depicted in SEQ ID NO: 659 and a VL-chain as depicted in SEQ ID NO: 660;
(p) a VH-chain as depicted in SEQ ID NO: 669 and a VL-chain as depicted in SEQ ID NO: 670;
(q) a VH-chain as depicted in SEQ ID NO: 679 and a VL-chain as depicted in SEQ ID NO: 680; and
(r) a VH-chain as depicted in SEQ ID NO: 689 and a VL-chain as depicted in SEQ ID NO: 690.

12. The antibody construct according to claim 9, wherein the second binding domain comprises an amino acid sequence as depicted in SEQ ID NO: 22, SEQ ID NO: 34, SEQ ID NO: 46, SEQ ID NO: 58, SEQ ID NO: 70, SEQ ID NO: 82, SEQ ID NO: 94, SEQ ID NO: 106, SEQ ID NO: 118, SEQ ID NO: 130, SEQ ID NO: 621, SEQ ID NO: 631, SEQ ID NO: 641, SEQ ID NO: 651, SEQ ID NO: 661, SEQ ID NO: 671, SEQ ID NO: 681, or SEQ ID NO: 691.

13. The antibody construct according to claim 1, wherein the domains are arranged from the N-terminus to the C-terminus a follows:
(FcRn binding peptide comprising SEQ ID NO:1)-(VH chain of the first binding domain)-(VL chain of the first binding domain)-(VH chain of the second binding domain)-(VL chain of the second binding domain)-(FcRn binding peptide comprising SEQ ID NO: 4)
or
(FcRn binding peptide comprising SEQ ID NO:4)-(VH chain of the first binding domain)-(VL chain of the first binding domain)-(VH chain of the second binding domain)-(VL chain of the second binding domain)-(FcRn binding peptide comprising SEQ ID NO: 1)

14. A polynucleotide encoding the antibody construct of claim 1.

15. A vector comprising the polynucleotide of claim 14.

16. A host cell transformed or transfected with the polynucleotide of claim 14.

17. A process for producing an antibody construct, said process comprising culturing the host cell of claim 16 under conditions allowing the expression of the antibody construct and, optionally, recovering the produced antibody construct from the culture.

18. A pharmaceutical composition comprising the antibody construct of claim 1.

19. (canceled)

20. A method for preventing, treating, or ameliorating a proliferative disease, a tumorous disease, a viral disease or an immunological disorder, comprising the step of administering to a subject in need thereof the antibody construct according to claim 1.

21. A kit comprising the antibody construct of claim 1 and a container or recipient.

The application's sequence listing, which the Patent Office published only in electronic form, follows.

SEQUENCE LISTING (692 sequences)

SEQ ID NO: 1 - protein, 16 aa, Artificial Sequence
  Synthetic polypeptide
  misc_feature (12)..(12): Xaa can be any naturally occurring amino acid
QRFVTGHFGGLXPANG

SEQ ID NO: 2 - protein, 16 aa, Artificial Sequence
  Synthetic polypeptide
QRFVTGHFGGLYPANG

SEQ ID NO: 3 - protein, 16 aa, Artificial Sequence
  Synthetic polypeptide
QRFVTGHFGGLHPANG

SEQ ID NO: 4 - protein, 9 aa, Artificial Sequence
  Synthetic polypeptide
TGHFGGLHP

SEQ ID NO: 5 - protein, 16 aa, Artificial Sequence
  Synthetic polypeptide
QRFCTGHFGGLHPCNG

SEQ ID NO: 6 - protein, 4 aa, Artificial Sequence
  Peptide linker
GGGS

SEQ ID NO: 7 - protein, 27 aa, Homo sapiens
QDGNEEMGGITQTPYKVSISGTTVILT

SEQ ID NO: 8 - protein, 27 aa, Callithrix jacchus
QDGNEEMGDTTQNPYKVSISGTTVTLT

SEQ ID NO: 9 - protein, 27 aa, Saguinus oedipus
QDGNEEMGDTTQNPYKVSISGTTVTLT

SEQ ID NO: 10 - protein, 27 aa, Saimiri sciureus
QDGNEEIGDTTQNPYKVSISGTTVTLT

SEQ ID NO: 11 - protein, 5 aa, Artificial Sequence
  Synthetic polypeptide
QDGNE

SEQ ID NO: 12 - protein, 14 aa, Artificial Sequence
  Synthetic polypeptide
GSSTGAVTSGYYPN

SEQ ID NO: 13 - protein, 7 aa, Artificial Sequence
  Synthetic polypeptide
GTKFLAP

SEQ ID NO: 14 - protein, 9 aa, Artificial Sequence
  Synthetic polypeptide
ALWYSNRWV

SEQ ID NO: 15 - protein, 5 aa, Artificial Sequence
  Synthetic polypeptide
IYAMN

SEQ ID NO: 16 - protein, 19 aa, Artificial Sequence
  Synthetic polypeptide
RIRSKYNNYATYYADSVKS

SEQ ID NO: 17 - protein, 14 aa, Artificial Sequence
  Synthetic polypeptide
HGNFGNSYVSFFAY

SEQ ID NO: 18 - protein, 125 aa, Artificial Sequence
  Synthetic polypeptide
EVQLVESGGGLVQPGGSLKLSCAASGFTFNIYAMNWVRQAPGKGLEWVARIRSKYNNYATYYADSVKSRFTISRDDSKNTAYLQMNNLKTEDTAVYYCVRHGNFGNSYVSFFAYWGQGTLVTVSS

SEQ ID NO: 19 - protein, 375 aa, Artificial Sequence
  Synthetic polypeptide
GAGGTGCAGCTGGTCGAGTCTGGAGGAGGATTGGTGCAGCCTGGAGGGTCATTGAAACTCTCATGTGCAGCCTCTGGATTCACCTTCAATATCTACGCCATGAACTGGGTCCGCCAGGCTCCAGGAAAGGGTTTGGAATGGGTTGCTCGCATAAGAAGTAAATATAATAATTATGCAACATATTATGCCGATTCAGTGAAAAGCAGGTTCACCATCTCCAGAGATGATTCAAAAAACACTGCCTATCTACAAATGAACAACTTGAAAACTGAGGACACTGCCGTGTACTACTGTGTGAGACATGGGAACTTCGGTAATAGCTACGTATCCTTCTTCGCTTACTGGGGCCAAGGGACTCTGGTCACCGTCTCCTCA

SEQ ID NO: 20 - protein, 109 aa, Artificial Sequence
  Synthetic polypeptide
QTVVTQEPSLTVSPGGTVTLTCGSSTGAVTSGYYPNWVQQKPGQAPRGLIGGTKFLAPGTPARFSGSLLGGKAALTLSGVQPEDEAEYYCALWYSNRWVFGGGTKLTVL

SEQ ID NO: 21 - protein, 327 aa, Artificial Sequence
  Synthetic polypeptide
CAGACTGTTGTGACTCAGGAACCTTCACTCACCGTATCACCTGGTGGAACAGTCACACTCACTTGTGGCTCCTCGACTGGGGCTGTTACATCTGGCTACTACCCAAACTGGGTCCAACAAAAACCAGGTCAGGCACCCCGTGGTCTAATAGGTGGGACTAAGTTCCTCGCCCCCGGTACTCCTGCCAGATTCTCAGGCTCCCTGCTTGGAGGCAAGGCTGCCCTCACCCTCTCAGGGGTACAGCCAGAGGATGAGGCAGAATATTACTGTGCTCTATGGTACAGCAACCGCTGGGTGTTCGGTGGAGGAACCAAACTGACTGTCCTA

SEQ ID NO: 22 - protein, 249 aa, Artificial Sequence
  Synthetic polypeptide
EVQLVESGGGLVQPGGSLKLSCAASGFTFNIYAMNWVRQAPGKGLEWVARIRSKYNNYATYYADSVKSRFTISRDDSKNTAYLQMNNLKTEDTAVYYCVRHGNFGNSYVSFFAYWGQGTLVTVSSGGGGSGGGGSGGGGSQTVVTQEPSLTVSPGGTVTLTCGSSTGAVTSGYYPNWVQQKPGQAPRGLIGGTKFLAPGTPARFSGSLLGGKAALTLSGVQPEDEAEYYCALWYSNRWVFGGGTKLTVL

SEQ ID NO: 23 - protein, 747 aa, Artificial Sequence
  Synthetic polypeptide
GAGGTGCAGCTGGTCGAGTCTGGAGGAGGATTGGTGCAGCCTGGAGGGTCATTGAAACTCTCATGTGCAGCCTCTGGATTCACCTTCAATATCTACGCCATGAACTGGGTCCGCCAGGCTCCAGGAAAGGGTTTGGAATGGGTTGCTCGCATAAGAAGTAAATATAATAATTATGCAACATATTATGCCGATTCAGTGAAAAGCAGGTTCACCATCTCCAGAGATGATTCAAAAAACACTGCCTATCTACAAATGAACAACTTGAAAACTGAGGACACTGCCGTGTACTACTGTGTGAGACATGGGAACTTCGGTAATAGCTACGTATCCTTCTTCGCTTACTGGGGCCAAGGGACTCTGGTCACCGTCTCCTCAGGTGGTGGTGGTTCTGGCGGCGGCGGCTCCGGTGGTGGTGGTTCTCAGACTGTTGTGACTCAGGAACCTTCACTCACCGTATCACCTGGTGGAACAGTCACACTCACTTGTGGCTCCTCGACTGGGGCTGTTACATCTGGCTACTACCCAAACTGGGTCCAACAAAAACCAGGTCAGGCACCCCGTGGTCTAATAGGTGGGACTAAGTTCCTCGCCCCCGGTACTCCTGCCAGATTCTCAGGCTCCCTGCTTGGAGGCAAGGCTGCCCTCACCCTCTCAGGGGTACAGCCAGAGGATGAGGCAGAATATTACTGTGCTCTATGGTACAGCAACCGCTGGGTGTTCGGTGGAGGAACCAAACTGACTGTCCTA

SEQ ID NO: 24 - protein, 14 aa, Artificial Sequence
  Synthetic polypeptide
GSSTGAVTSGYYPN

SEQ ID NO: 25 - protein, 7 aa, Artificial Sequence
  Synthetic polypeptide
GTKFLAP

SEQ ID NO: 26 - protein, 9 aa, Artificial Sequence
  Synthetic polypeptide
ALWYSNRWV

SEQ ID NO: 27 - protein, 5 aa, Artificial Sequence
  Synthetic polypeptide
KYAMN

SEQ ID NO: 28 - protein, 19 aa, Artificial Sequence
  Synthetic polypeptide
RIRSKYNNYATYYADSVKD

SEQ ID NO: 29 - protein, 14 aa, Artificial Sequence
  Synthetic polypeptide
HGNFGNSYISYWAY

SEQ ID NO: 30 - protein, 125 aa, Artificial Sequence
  Synthetic polypeptide
EVQLVESGGGLVQPGGSLKLSCAASGFTFNKYAMNWVRQAPGKGLEWVARIRSKYNNYATYYADSVKDRFTISRDDSKNTAYLQMNNLKTEDTAVYYCVRHGNFGNSYISYWAYWGQGTLVTVSS

SEQ ID NO: 31 - protein, 375 aa, Artificial Sequence
  Synthetic polypeptide
GAGGTGCAGCTGGTCGAGTCTGGAGGAGGATTGGTGCAGCCTGGAGGGTCATTGAAACTCTCATGTGCAGCCTCTGGATTCACCTTCAATAAGTACGCCATGAACTGGGTCCGCCAGGCTCCAGGAAAGGGTTTGGAATGGGTTGCTCGCATAAGAAGTAAATATAATAATTATGCAACATATTATGCCGATTCAGTGAAAGACAGGTTCACCATCTCCAGAGATGATTCAAAAAACACTGCCTATCTACAAATGAACAACTTGAAAACTGAGGACACTGCCGTGTACTACTGTGTGAGACATGGGAACTTCGGTAATAGCTACATATCCTACTGGGCTTACTGGGGCCAAGGGACTCTGGTCACCGTCTCCTCA

SEQ ID NO: 32 - protein, 109 aa, Artificial Sequence; identical to SEQ ID NO: 20
  Synthetic polypeptide

SEQ ID NO: 33 - protein, 327 aa, Artificial Sequence; identical to SEQ ID NO: 21
  Synthetic polypeptide

SEQ ID NO: 34 - protein, 249 aa, Artificial Sequence
  Synthetic polypeptide
EVQLVESGGGLVQPGGSLKLSCAASGFTFNKYAMNWVRQAPGKGLEWVARIRSKYNNYATYYADSVKDRFTISRDDSKNTAYLQMNNLKTEDTAVYYCVRHGNFGNSYISYWAYWGQGTLVTVSSGGGGSGGGGSGGGGSQTVVTQEPSLTVSPGGTVTLTCGSSTGAVTSGYYPNWVQQKPGQAPRGLIGGTKFLAPGTPARFSGSLLGGKAALTLSGVQPEDEAEYYCALWYSNRWVFGGGTKLTVL

SEQ ID NO: 35 - protein, 747 aa, Artificial Sequence
  Synthetic polypeptide
GAGGTGCAGCTGGTCGAGTCTGGAGGAGGATTGGTGCAGCCTGGAGGGTCATTGAAACTCTCATGTGCAGCCTCTGGATTCACCTTCAATAAGTACGCCATGAACTGGGTCCGCCAGGCTCCAGGAAAGGGTTTGGAATGGGTTGCTCGCATAAGAAGTAAATATAATAATTATGCAACATATTATGCCGATTCAGTGAAAGACAGGTTCACCATCTCCAGAGATGATTCAAAAAACACTGCCTATCTACAAATGAACAACTTGAAAACTGAGGACACTGCCGTGTACTACTGTGTGAGACATGGGAACTTCGGTAATAGCTACATATCCTACTGGGCTTACTGGGGCCAAGGGACTCTGGTCACCGTCTCCTCAGGTGGTGGTGGTTCTGGCGGCGGCGGCTCCGGTGGTGGTGGTTCTCAGACTGTTGTGACTCAGGAACCTTCACTCACCGTATCACCTGGTGGAACAGTCACACTCACTTGTGGCTCCTCGACTGGGGCTGTTACATCTGGCTACTACCCAAACTGGGTCCAACAAAAACCAGGTCAGGCACCCCGTGGTCTAATAGGTGGGACTAAGTTCCTCGCCCCCGGTACTCCTGCCAGATTCTCAGGCTCCCTGCTTGGAGGCAAGGCTGCCCTCACCCTCTCAGGGGTACAGCCAGAGGATGAGGCAGAATATTACTGTGCTCTATGGTACAGCAACCGCTGGGTGTTCGGTGGAGGAACCAAACTGACTGTCCTA

SEQ ID NO: 36 - protein, 14 aa, Artificial Sequence
  Synthetic polypeptide
GSSTGAVTSGYYPN

SEQ ID NO: 37 - protein, 7 aa, Artificial Sequence
  Synthetic polypeptide
GTKFLAP

SEQ ID NO: 38 - protein, 9 aa, Artificial Sequence
  Synthetic polypeptide
ALWYSNRWV

SEQ ID NO: 39 - protein, 5 aa, Artificial Sequence
  Synthetic polypeptide
SYAMN

SEQ ID NO: 40 - protein, 19 aa, Artificial Sequence
  Synthetic polypeptide
RIRSKYNNYATYYADSVKG

SEQ ID NO: 41 - protein, 14 aa, Artificial Sequence
  Synthetic polypeptide
HGNFGNSYLSFWAY

SEQ ID NO: 42 - protein, 125 aa, Artificial Sequence
  Synthetic polypeptide
EVQLVESGGGLEQPGGSLKLSCAASGFTFNSYAMNWVRQAPGKGLEWVARIRSKYNNYATYYADSVKGRFTISRDDSKNTAYLQMNNLKTEDTAVYYCVRHGNFGNSYLSFWAYWGQGTLVTVSS

SEQ ID NO: 43 - protein, 374 aa, Artificial Sequence
  Synthetic polypeptide
GAGGTGCAGCTGGTCGAGTCTGGAGGAGGATTGGAGCAGCCTGGAGGGTCATTGAAACTCTCATGTGCAGCCTCTGGATTCACCTTCAATTCGTACGCCATGAACTGGGTCCGCCAGGCTCCAGGAAAGGGTTTGGAATGGGTTGCTCGCATAAGAAGTAAATATAATAATTATGCAACATATTATGCCGATTCAGTGAAAGGGAGGTTCACCATCTCCAGAGATGATTCAAAAAACACTGCCTATCTACAAATGAACAACTTGAAAACTGAGGACACTGCCGTGTACTACTGTGTGAGACATGGGAACTTCGGTAATAGCTACCTATCCTTCTGGGCTTACTGGGGCCAAGGGACTCTGGTCACCGTCTCCTC

SEQ ID NO: 44 - protein, 109 aa, Artificial Sequence; identical to SEQ ID NO: 20
  Synthetic polypeptide

SEQ ID NO: 45 - protein, 327 aa, Artificial Sequence; identical to SEQ ID NO: 21
  Synthetic polypeptide

SEQ ID NO: 46 - protein, 249 aa, Artificial Sequence
  Synthetic polypeptide
EVQLVESGGGLEQPGGSLKLSCAASGFTFNSYAMNWVRQAPGKGLEWVARIRSKYNNYATYYADSVKGRFTISRDDSKNTAYLQMNNLKTEDTAVYYCVRHGNFGNSYLSFWAYWGQGTLVTVSSGGGGSGGGGSGGGGSQTVVTQEPSLTVSPGGTVTLTCGSSTGAVTSGYYPNWVQQKPGQAPRGLIGGTKFLAPGTPARFSGSLLGGKAALTLSGVQPEDEAEYYCALWYSNRWVFGGGTKLTVL

SEQ ID NO: 47 - protein, 747 aa, Artificial Sequence
  Synthetic polypeptide
GAGGTGCAGCTGGTCGAGTCTGGAGGAGGATTGGAGCAGCCTGGAGGGTCATTGAAACTCTCATGTGCAGCCTCTGGATTCACCTTCAATTCGTACGCCATGAACTGGGTCCGCCAGGCTCCAGGAAAGGGTTTGGAATGGGTTGCTCGCATAAGAAGTAAATATAATAATTATGCAACATATTATGCCGATTCAGTGAAAGGGAGGTTCACCATCTCCAGAGATGATTCAAAAAACACTGCCTATCTACAAATGAACAACTTGAAAACTGAGGACACTGCCGTGTACTACTGTGTGAGACATGGGAACTTCGGTAATAGCTACCTATCCTTCTGGGCTTACTGGGGCCAAGGGACTCTGGTCACCGTCTCCTCAGGTGGTGGTGGTTCTGGCGGCGGCGGCTCCGGTGGTGGTGGTTCTCAGACTGTTGTGACTCAGGAACCTTCACTCACCGTATCACCTGGTGGAACAGTCACACTCACTTGTGGCTCCTCGACTGGGGCTGTTACATCTGGCTACTACCCAAACTGGGTCCAACAAAAACCAGGTCAGGCACCCCGTGGTCTAATAGGTGGGACTAAGTTCCTCGCCCCCGGTACTCCTGCCAGATTCTCAGGCTCCCTGCTTGGAGGCAAGGCTGCCCTCACCCTCTCAGGGGTACAGCCAGAGGATGAGGCAGAATATTACTGTGCTCTATGGTACAGCAACCGCTGGGTGTTCGGTGGAGGAACCAAACTGACTGTCCTA

SEQ ID NO: 48 - protein, 14 aa, Artificial Sequence
  Synthetic polypeptide
GSSTGAVTSGYYPN

SEQ ID NO: 49 - protein, 7 aa, Artificial Sequence
  Synthetic polypeptide
GTKFLAP

SEQ ID NO: 50 - protein, 9 aa, Artificial Sequence
  Synthetic polypeptide
ALWYSNRWV

SEQ ID NO: 51 - protein, 5 aa, Artificial Sequence
  Synthetic polypeptide
RYAMN

SEQ ID NO: 52 - protein, 19 aa, Artificial Sequence
  Synthetic polypeptide
RIRSKYNNYATYYADSVKG

SEQ ID NO: 53 - protein, 14 aa, Artificial Sequence
  Synthetic polypeptide
HGNFGNSYLSYFAY

SEQ ID NO: 54 - protein, 125 aa, Artificial Sequence
  Synthetic polypeptide
EVQLVESGGGLVQPGGSLKLSCAASGFTFNRYAMNWVRQAPGKGLEWVARIRSKYNNYATYYADSVKGRFTISRDDSKNTAYLQMNNLKTEDTAVYYCVRHGNFGNSYLSYFAYWGQGTLVTVSS

SEQ ID NO: 55 - protein, 375 aa, Artificial Sequence
  Synthetic polypeptide
GAGGTGCAGCTGGTCGAGTCTGGAGGAGGATTGGTGCAGCCTGGAGGGTCATTGAAACTCTCATGTGCAGCCTCTGGATTCACCTTCAATCGCTACGCCATGAACTGGGTCCGCCAGGCTCCAGGAAAGGGTTTGGAATGGGTTGCTCGCATAAGAAGTAAATATAATAATTATGCAACATATTATGCCGATTCAGTGAAAGGGAGGTTCACCATCTCCAGAGATGATTCAAAAAACACTGCCTATCTACAAATGAACAACTTGAAAACTGAGGACACTGCCGTGTACTACTGTGTGAGACATGGGAACTTCGGTAATAGCTACTTATCCTACTTCGCTTACTGGGGCCAAGGGACTCTGGTCACCGTCTCCTCA

SEQ ID NO: 56 - protein, 109 aa, Artificial Sequence; identical to SEQ ID NO: 20
  Synthetic polypeptide

SEQ ID NO: 57 - protein, 327 aa, Artificial Sequence; identical to SEQ ID NO: 21
  Synthetic polypeptide

SEQ ID NO: 58 - protein, 249 aa, Artificial Sequence
  Synthetic polypeptide
EVQLVESGGGLVQPGGSLKLSCAASGFTFNRYAMNWVRQAPGKGLEWVARIRSKYNNYATYYADSVKGRFTISRDDSKNTAYLQMNNLKTEDTAVYYCVRHGNFGNSYLSYFAYWGQGTLVTVSSGGGGSGGGGSGGGGSQTVVTQEPSLTVSPGGTVTLTCGSSTGAVTSGYYPNWVQQKPGQAPRGLIGGTKFLAPGTPARFSGSLLGGKAALTLSGVQPEDEAEYYCALWYSNRWVFGGGTKLTVL

SEQ ID NO: 59 - protein, 747 aa, Artificial Sequence
  Synthetic polypeptide
GAGGTGCAGCTGGTCGAGTCTGGAGGAGGATTGGTGCAGCCTGGAGGGTCATTGAAACTCTCATGTGCAGCCTCTGGATTCACCTTCAATCGCTACGCCATGAACTGGGTCCGCCAGGCTCCAGGAAAGGGTTTGGAATGGGTTGCTCGCATAAGAAGTAAATATAATAATTATGCAACATATTATGCCGATTCAGTGAAAGGGAGGTTCACCATCTCCAGAGATGATTCAAAAAACACTGCCTATCTACAAATGAACAACTTGAAAACTGAGGACACTGCCGTGTACTACTGTGTGAGACATGGGAACTTCGGTAATAGCTACTTATCCTACTTCGCTTACTGGGGCCAAGGGACTCTGGTCACCGTCTCCTCAGGTGGTGGTGGTTCTGGCGGCGGCGGCTCCGGTGGTGGTGGTTCTCAGACTGTTGTGACTCAGGAACCTTCACTCACCGTATCACCTGGTGGAACAGTCACACTCACTTGTGGCTCCTCGACTGGGGCTGTTACATCTGGCTACTACCCAAACTGGGTCCAACAAAAACCAGGTCAGGCACCCCGTGGTCTAATAGGTGGGACTAAGTTCCTCGCCCCCGGTACTCCTGCCAGATTCTCAGGCTCCCTGCTTGGAGGCAAGGCTGCCCTCACCCTCTCAGGGGTACAGCCAGAGGATGAGGCAGAATATTACTGTGCTCTATGGTACAGCAACCGCTGGGTGTTCGGTGGAGGAACCAAACTGACTGTCCTA

SEQ ID NO: 60 - protein, 14 aa, Artificial Sequence
  Synthetic polypeptide
RSSTGAVTSGYYPN

SEQ ID NO: 61 - protein, 7 aa, Artificial Sequence
  Synthetic polypeptide
ATDMRPS

SEQ ID NO: 62 - protein, 9 aa, Artificial Sequence
  Synthetic polypeptide
ALWYSNRWV

SEQ ID NO: 63 - protein, 5 aa, Artificial Sequence
  Synthetic polypeptide
VYAMN

SEQ ID NO: 64 - protein, 19 aa, Artificial Sequence
  Synthetic polypeptide
RIRSKYNNYATYYADSVKK

SEQ ID NO: 65 - protein, 14 aa, Artificial Sequence
  Synthetic polypeptide
HGNFGNSYLSWWAY

SEQ ID NO: 66 - protein, 125 aa, Artificial Sequence
  Synthetic polypeptide
EVQLVESGGGLVQPGGSLKLSCAASGFTFNVYAMNWVRQAPGKGLEWVARIRSKYNNYATYYADSVKKRFTISRDDSKNTAYLQMNNLKTEDTAVYYCVRHGNFGNSYLSWWAYWGQGTLVTVSS

SEQ ID NO: 67 - protein, 375 aa, Artificial Sequence
  Synthetic polypeptide
GAGGTGCAGCTGGTCGAGTCTGGAGGAGGATTGGTGCAGCCTGGAGGGTCATTGAAACTCTCATGTGCAGCCTCTGGATTCACCTTCAATGTCTACGCCATGAACTGGGTCCGCCAGGCTCCAGGAAAGGGTTTGGAATGGGTTGCTCGCATAAGAAGTAAATATAATAATTATGCAACATATTATGCCGATTCAGTGAAAAAGAGGTTCACCATCTCCAGAGATGATTCAAAAAACACTGCCTATCTACAAATGAACAACTTGAAAACTGAGGACACTGCCGTGTACTACTGTGTGAGACATGGGAACTTCGGTAATAGCTACTTATCCTGGTGGGCTTACTGGGGCCAAGGGACTCTGGTCACCGTCTCCTCA

SEQ ID NO: 68 - protein, 109 aa, Artificial Sequence
  Synthetic polypeptide
QTVVTQEPSLTVSPGGTVTLTCRSSTGAVTSGYYPNWVQQKPGQAPRGLIGATDMRPSGTPARFSGSLLGGKAALTLSGVQPEDEAEYYCALWYSNRWVFGGGTKLTVL

SEQ ID NO: 69 - protein, 327 aa, Artificial Sequence
  Synthetic polypeptide
CAGACTGTTGTGACTCAGGAACCTTCACTCACCGTATCACCTGGTGGAACAGTCACACTCACTTGTCGCTCCTCGACTGGGGCTGTTACATCTGGCTACTACCCAAACTGGGTCCAACAAAAACCAGGTCAGGCACCCCGTGGTCTAATAGGTGCCACTGACATGAGGCCCTCTGGTACTCCTGCCAGATTCTCAGGCTCCCTGCTTGGAGGCAAGGCTGCCCTCACCCTCTCAGGGGTACAGCCAGAGGATGAGGCAGAATATTACTGTGCTCTATGGTACAGCAACCGCTGGGTGTTCGGTGGAGGAACCAAACTGACTGTCCTA

SEQ ID NO: 70 - protein, 249 aa, Artificial Sequence
  Synthetic polypeptide
EVQLVESGGGLVQPGGSLKLSCAASGFTFNVYAMNWVRQAPGKGLEWVARIRSKYNNYATYYADSVKKRFTISRDDSKNTAYLQMNNLKTEDTAVYYCVRHGNFGNSYLSWWAYWGQGTLVTVSSGGGGSGGGGSGGGGSQTVVTQEPSLTVSPGGTVTLTCRSSTGAVTSGYYPNWVQQKPGQAPRGLIGATDMRPSGTPARFSGSLLGGKAALTLSGVQPEDEAEYYCALWYSNRWVFGGGTKLTVL

SEQ ID NO: 71 - protein, 747 aa, Artificial Sequence
  Synthetic polypeptide
GAGGTGCAGCTGGTCGAGTCTGGAGGAGGATTGGTGCAGCCTGGAGGGTCATTGAAACTCTCATGTGCAGCCTCTGGATTCACCTTCAATGTCTACGCCATGAACTGGGTCCGCCAGGCTCCAGGAAAGGGTTTGGAATGGGTTGCTCGCATAAGAAGTAAATATAATAATTATGCAACATATTATGCCGATTCAGTGAAAAAGAGGTTCACCATCTCCAGAGATGATTCAAAAAACACTGCCTATCTACAAATGAACAACTTGAAAACTGAGGACACTGCCGTGTACTACTGTGTGAGACATGGGAACTTCGGTAATAGCTACTTATCCTGGTGGGCTTACTGGGGCCAAGGGACTCTGGTCACCGTCTCCTCAGGTGGTGGTGGTTCTGGCGGCGGCGGCTCCGGTGGTGGTGGTTCTCAGACTGTTGTGACTCAGGAACCTTCACTCACCGTATCACCTGGTGGAACAGTCACACTCACTTGTCGCTCCTCGACTGGGGCTGTTACATCTGGCTACTACCCAAACTGGGTCCAACAAAAACCAGGTCAGGCACCCCGTGGTCTAATAGGTGCCACTGACATGAGGCCCTCTGGTACTCCTGCCAGATTCTCAGGCTCCCTGCTTGGAGGCAAGGCTGCCCTCACCCTCTCAGGGGTACAGCCAGAGGATGAGGCAGAATATTACTGTGCTCTATGGTACAGCAACCGCTGGGTGTTCGGTGGAGGAACCAAACTGACTGTCCTA

SEQ ID NO: 72 - protein, 14 aa, Artificial Sequence
  Synthetic polypeptide
GSSTGAVTSGYYPN

SEQ ID NO: 73 - protein, 7 aa, Artificial Sequence
  Synthetic polypeptide
GTKFLAP

SEQ ID NO: 74 - protein, 9 aa, Artificial Sequence
  Synthetic polypeptide
ALWYSNRWV

SEQ ID NO: 75 - protein, 5 aa, Artificial Sequence
  Synthetic polypeptide
KYAMN

SEQ ID NO: 76 - protein, 19 aa, Artificial Sequence
  Synthetic polypeptide
RIRSKYNNYATYYADSVKS

SEQ ID NO: 77 - protein, 14 aa, Artificial Sequence
  Synthetic polypeptide
HGNFGNSYTSYYAY

SEQ ID NO: 78 - protein, 125 aa, Artificial Sequence
  Synthetic polypeptide
EVQLVESGGGLVQPGGSLKLSCAASGFTFNKYAMNWVRQAPGKGLEWVARIRSKYNNYATYYADSVKSRFTISRDDSKNTAYLQMNNLKTEDTAVYYCVRHGNFGNSYTSYYAYWGQGTLVTVSS

SEQ ID NO: 79 - protein, 375 aa, Artificial Sequence
  Synthetic polypeptide
GAGGTGCAGCTGGTCGAGTCTGGAGGAGGATTGGTGCAGCCTGGAGGGTCATTGAAACTCTCATGTGCAGCCTCTGGATTCACCTTCAATAAGTACGCCATGAACTGGGTCCGCCAGGCTCCAGGAAAGGGTTTGGAATGGGTTGCTCGCATAAGAAGTAAATATAATAATTATGCAACATATTATGCCGATTCAGTGAAATCGAGGTTCACCATCTCCAGAGATGATTCAAAAAACACTGCCTATCTACAAATGAACAACTTGAAAACTGAGGACACTGCCGTGTACTACTGTGTGAGACATGGGAACTTCGGTAATAGCTACACATCCTACTACGCTTACTGGGGCCAAGGGACTCTGGTCACCGTCTCCTCA

SEQ ID NO: 80 - protein, 109 aa, Artificial Sequence; identical to SEQ ID NO: 20
  Synthetic polypeptide

SEQ ID NO: 81 - protein, 327 aa, Artificial Sequence; identical to SEQ ID NO: 21
  Synthetic polypeptide

SEQ ID NO: 82 - protein, 249 aa, Artificial Sequence
  Synthetic polypeptide
EVQLVESGGGLVQPGGSLKLSCAASGFTFNKYAMNWVRQAPGKGLEWVARIRSKYNNYATYYADSVKSRFTISRDDSKNTAYLQMNNLKTEDTAVYYCVRHGNFGNSYTSYYAYWGQGTLVTVSSGGGGSGGGGSGGGGSQTVVTQEPSLTVSPGGTVTLTCGSSTGAVTSGYYPNWVQQKPGQAPRGLIGGTKFLAPGTPARFSGSLLGGKAALTLSGVQPEDEAEYYCALWYSNRWVFGGGTKLTVL

SEQ ID NO: 83 - protein, 747 aa, Artificial Sequence
  Synthetic polypeptide
GAGGTGCAGCTGGTCGAGTCTGGAGGAGGATTGGTGCAGCCTGGAGGGTCATTGAAACTCTCATGTGCAGCCTCTGGATTCACCTTCAATAAGTACGCCATGAACTGGGTCCGCCAGGCTCCAGGAAAGGGTTTGGAATGGGTTGCTCGCATAAGAAGTAAATATAATAATTATGCAACATATTATGCCGATTCAGTGAAATCGAGGTTCACCATCTCCAGAGATGATTCAAAAAACACTGCCTATCTACAAATGAACAACTTGAAAACTGAGGACACTGCCGTGTACTACTGTGTGAGACATGGGAACTTCGGTAATAGCTACACATCCTACTACGCTTACTGGGGCCAAGGGACTCTGGTCACCGTCTCCTCAGGTGGTGGTGGTTCTGGCGGCGGCGGCTCCGGTGGTGGTGGTTCTCAGACTGTTGTGACTCAGGAACCTTCACTCACCGTATCACCTGGTGGAACAGTCACACTCACTTGTGGCTCCTCGACTGGGGCTGTTACATCTGGCTACTACCCAAACTGGGTCCAACAAAAACCAGGTCAGGCACCCCGTGGTCTAATAGGTGGGACTAAGTTCCTCGCCCCCGGTACTCCTGCCAGATTCTCAGGCTCCCTGCTTGGAGGCAAGGCTGCCCTCACCCTCTCAGGGGTACAGCCAGAGGATGAGGCAGAATATTACTGTGCTCTATGGTACAGCAACCGCTGGGTGTTCGGTGGAGGAACCAAACTGACTGTCCTA

SEQ ID NO: 84 - protein, 14 aa, Artificial Sequence
  Synthetic polypeptide
RSSTGAVTSGYYPN

SEQ ID NO: 85 - protein, 7 aa, Artificial Sequence
  Synthetic polypeptide
ATDMRPS

SEQ ID NO: 86 - protein, 9 aa, Artificial Sequence
  Synthetic polypeptide
ALWYSNRWV

SEQ ID NO: 87 - protein, 5 aa, Artificial Sequence
  Synthetic polypeptide
GYAMN

SEQ ID NO: 88 - protein, 19 aa, Artificial Sequence
  Synthetic polypeptide
RIRSKYNNYATYYADSVKE

SEQ ID NO: 89 - protein, 14 aa, Artificial Sequence
  Synthetic polypeptide
HRNFGNSYLSWFAY

SEQ ID NO: 90 - protein, 125 aa, Artificial Sequence
  Synthetic polypeptide
EVQLVESGGGLVQPGGSLKLSCAASGFTFNGYAMNWVRQAPGKGLEWVARIRSKYNNYATYYADSVKERFTISRDDSKNTAYLQMNNLKTEDTAVYYCVRHRNFGNSYLSWFAYWGQGTLVTVSS

SEQ ID NO: 91 - protein, 375 aa, Artificial Sequence
  Synthetic polypeptide
GAGGTGCAGCTGGTCGAGTCTGGAGGAGGATTGGTGCAGCCTGGAGGGTCATTGAAACTCTCATGTGCAGCCTCTGGATTCACCTTCAATGGCTACGCCATGAACTGGGTCCGCCAGGCTCCAGGAAAGGGTTTGGAATGGGTTGCTCGCATAAGAAGTAAATATAATAATTATGCAACATATTATGCCGATTCAGTGAAAGAGAGGTTCACCATCTCCAGAGATGATTCAAAAAACACTGCCTATCTACAAATGAACAACTTGAAAACTGAGGACACTGCCGTGTACTACTGTGTGAGACATAGGAACTTCGGTAATAGCTACTTATCCTGGTTCGCTTACTGGGGCCAAGGGACTCTGGTCACCGTCTCCTCA

SEQ ID NO: 92 - protein, 109 aa, Artificial Sequence; identical to SEQ ID NO: 68
  Synthetic polypeptide

SEQ ID NO: 93 - protein, 327 aa, Artificial Sequence; identical to SEQ ID NO: 69
  Synthetic polypeptide

SEQ ID NO: 94 - protein, 249 aa, Artificial Sequence
  Synthetic polypeptide
EVQLVESGGGLVQPGGSLKLSCAASGFTFNGYAMNWVRQAPGKGLEWVARIRSKYNNYATYYADSVKERFTISRDDSKNTAYLQMNNLKTEDTAVYYCVRHRNFGNSYLSWFAYWGQGTLVTVSSGGGGSGGGGSGGGGSQTVVTQEPSLTVSPGGTVTLTCRSSTGAVTSGYYPNWVQQKPGQAPRGLIGATDMRPSGTPARFSGSLLGGKAALTLSGVQPEDEAEYYCALWYSNRWVFGGGTKLTVL

SEQ ID NO: 95 - protein, 747 aa, Artificial Sequence
  Synthetic polypeptide
GAGGTGCAGCTGGTCGAGTCTGGAGGAGGATTGGTGCAGCCTGGAGGGTCATTGAAACTCTCATGTGCAGCCTCTGGATTCACCTTCAATGGCTACGCCATGAACTGGGTCCGCCAGGCTCCAGGAAAGGGTTTGGAATGGGTTGCTCGCATAAGAAGTAAATATAATAATTATGCAACATATTATGCCGATTCAGTGAAAGAGAGGTTCACCATCTCCAGAGATGATTCAAAAAACACTGCCTATCTACAAATGAACAACTTGAAAACTGAGGACACTGCCGTGTACTACTGTGTGAGACATAGGAACTTCGGTAATAGCTACTTATCCTGGTTCGCTTACTGGGGCCAAGGGACTCTGGTCACCGTCTCCTCAGGTGGTGGTGGTTCTGGCGGCGGCGGCTCCGGTGGTGGTGGTTCTCAGACTGTTGTGACTCAGGAACCTTCACTCACCGTATCACCTGGTGGAACAGTCACACTCACTTGTCGCTCCTCGACTGGGGCTGTTACATCTGGCTACTACCCAAACTGGGTCCAACAAAAACCAGGTCAGGCACCCCGTGGTCTAATAGGTGCCACTGACATGAGGCCCTCTGGTACTCCTGCCAGATTCTCAGGCTCCCTGCTTGGAGGCAAGGCTGCCCTCACCCTCTCAGGGGTACAGCCAGAGGATGAGGCAGAATATTACTGTGCTCTATGGTACAGCAACCGCTGGGTGTTCGGTGGAGGAACCAAACTGACTGTCCTA

SEQ ID NO: 96 - protein, 14 aa, Artificial Sequence
  Synthetic polypeptide
GSSTGAVTSGYYPN

SEQ ID NO: 97 - protein, 7 aa, Artificial Sequence
  Synthetic polypeptide
GTKFLAP

SEQ ID NO: 98 - protein, 9 aa, Artificial Sequence
  Synthetic polypeptide
ALWYSNRWV

SEQ ID NO: 99 - protein, 5 aa, Artificial Sequence
  Synthetic polypeptide
VYAMN

SEQ ID NO: 100 - protein, 19 aa, Artificial Sequence
  Synthetic polypeptide
RIRSKYNNYATYYADSVKK

SEQ ID NO: 101 - protein, 14 aa, Artificial Sequence
  Synthetic polypeptide
HGNFGNSYISWWAY

SEQ ID NO: 102 - protein, 125 aa, Artificial Sequence
  Synthetic polypeptide
EVQLVESGGGLVQPGGSLKLSCAASGFTFNVYAMNWVRQAPGKGLEWVARIRSKYNNYATYYADSVKKRFTISRDDSKNTAYLQMNNLKTEDTAVYYCVRHGNFGNSYISWWAYWGQGTLVTVSS

SEQ ID NO: 103 - protein, 375 aa, Artificial Sequence
  Synthetic polypeptide
GAGGTGCAGCTGGTCGAGTCTGGAGGAGGATTGGTGCAGCCTGGAGGGTCATTGAAACTCTCATGTGCAGCCTCTGGATTCACCTTCAATGTGTACGCCATGAACTGGGTCCGCCAGGCTCCAGGAAAGGGTTTGGAATGGGTTGCTCGCATAAGAAGTAAATATAATAATTATGCAACATATTATGCCGATTCAGTGAAAAAGAGGTTCACCATCTCCAGAGATGATTCAAAAAACACTGCCTATCTACAAATGAACAACTTGAAAACTGAGGACACTGCCGTGTACTACTGTGTGAGACATGGGAACTTCGGTAATAGCTACATATCCTGGTGGGCTTACTGGGGCCAAGGGACTCTGGTCACCGTCTCCTCA

SEQ ID NO: 104 - protein, 109 aa, Artificial Sequence; identical to SEQ ID NO: 20
  Synthetic polypeptide

SEQ ID NO: 105 - protein, 327 aa, Artificial Sequence; identical to SEQ ID NO: 21
  Synthetic polypeptide

SEQ ID NO: 106 - protein, 249 aa, Artificial Sequence
  Synthetic polypeptide
EVQLVESGGGLVQPGGSLKLSCAASGFTFNVYAMNWVRQAPGKGLEWVARIRSKYNNYATYYADSVKKRFTISRDDSKNTAYLQMNNLKTEDTAVYYCVRHGNFGNSYISWWAYWGQGTLVTVSSGGGGSGGGGSGGGGSQTVVTQEPSLTVSPGGTVTLTCGSSTGAVTSGYYPNWVQQKPGQAPRGLIGGTKFLAPGTPARFSGSLLGGKAALTLSGVQPEDEAEYYCALWYSNRWVFGGGTKLTVL

SEQ ID NO: 107 - protein, 747 aa, Artificial Sequence
  Synthetic polypeptide
GAGGTGCAGCTGGTCGAGTCTGGAGGAGGATTGGTGCAGCCTGGAGGGTCATTGAAACTCTCATGTGCAGCCTCTGGATTCACCTTCAATGTGTACGCCATGAACTGGGTCCGCCAGGCTCCAGGAAAGGGTTTGGAATGGGTTGCTCGCATAAGAAGTAAATATAATAATTATGCAACATATTATGCCGATTCAGTGAAAAAGAGGTTCACCATCTCCAGAGATGATTCAAAAAACACTGCCTATCTACAAATGAACAACTTGAAAACTGAGGACACTGCCGTGTACTACTGTGTGAGACATGGGAACTTCGGTAATAGCTACATATCCTGGTGGGCTTACTGGGGCCAAGGGACTCTGGTCACCGTCTCCTCAGGTGGTGGTGGTTCTGGCGGCGGCGGCTCCGGTGGTGGTGGTTCTCAGACTGTTGTGACTCAGGAACCTTCACTCACCGTATCACCTGGTGGAACAGTCACACTCACTTGTGGCTCCTCGACTGGGGCTGTTACATCTGGCTACTACCCAAACTGGGTCCAACAAAAACCAGGTCAGGCACCCCGTGGTCTAATAGGTGGGACTAAGTTCCTCGCCCCCGGTACTCCTGCCAGATTCTCAGGCTCCCTGCTTGGAGGCAAGGCTGCCCTCACCCTCTCAGGGGTACAGCCAGAGGATGAGGCAGAATATTACTGTGCTCTATGGTACAGCAACCGCTGGGTGTTCGGTGGAGGAACCAAACTGACTGTCCTA

SEQ ID NO: 108 - protein, 14 aa, Artificial Sequence
  Synthetic polypeptide
GSSTGAVTSGNYPN

SEQ ID NO: 109 - protein, 7 aa, Artificial Sequence
  Synthetic polypeptide
GTKFLAP

SEQ ID NO: 110 - protein, 9 aa, Artificial Sequence
  Synthetic polypeptide
VLWYSNRWV

SEQ ID NO: 111 - protein, 5 aa, Artificial Sequence
  Synthetic polypeptide
SYAMN

SEQ ID NO: 112 - protein, 19 aa, Artificial Sequence
  Synthetic polypeptide
RIRSKYNNYATYYADSVKG

SEQ ID NO: 113 - protein, 14 aa, Artificial Sequence
  Synthetic polypeptide
HGNFGNSYVSWWAY

SEQ ID NO: 114 - protein, 125 aa, Artificial Sequence
  Synthetic polypeptide
EVQLVESGGGLVQPGGSLKLSCAASGFTFNSYAMNWVRQAPGKGLEWVARIRSKYNNYATYYADSVKGRFTISRDDSKNTAYLQMNNLKTEDTAVYYCVRHGNFGNSYVSWWAYWGQGTLVTVSS

SEQ ID NO: 115 - protein, 375 aa, Artificial Sequence
  Synthetic polypeptide
GAGGTGCAGCTGGTCGAGTCTGGAGGAGGATTGGTGCAGCCTGGAGGGTCATTGAAACTCTCATGTGCAGCCTCTGGATTCACCTTCAATAGCTACGCCATGAACTGGGTCCGCCAGGCTCCAGGAAAGGGTTTGGAATGGGTTGCTCGCATAAGAAGTAAATATAATAATTATGCAACATATTATGCCGATTCAGTGAAAGGCAGGTTCACCATCTCCAGAGATGATTCAAAAAACACTGCCTATCTACAAATGAACAACTTGAAAACTGAGGACACTGCCGTGTACTACTGTGTGAGACATGGGAACTTCGGTAATAGCTACGTTTCCTGGTGGGCTTACTGGGGCCAAGGGACTCTGGTCACCGTCTCCTCA

SEQ ID NO: 116 - protein, 109 aa, Artificial Sequence
  Synthetic polypeptide
QTVVTQEPSLTVSPGGTVTLTCGSSTGAVTSGNYPNWVQQKPGQAPRGLIGGTKFLAPGTPARFSGSLLGGKAALTLSGVQPEDEAEYYCVLWYSNRWVFGGGTKLTVL

SEQ ID NO: 117 - protein, 327 aa, Artificial Sequence
  Synthetic polypeptide
CAGACTGTTGTGACTCAGGAACCTTCACTCACCGTATCACCTGGTGGAACAGTCACACTCACTTGTGGCTCCTCGACTGGGGCTGTTACATCTGGCAACTACCCAAACTGGGTCCAACAAAAACCAGGTCAGGCACCCCGTGGTCTAATAGGTGGGACTAAGTTCCTCGCCCCCGGTACTCCTGCCAGATTCTCAGGCTCCCTGCTTGGAGGCAAGGCTGCCCTCACCCTCTCAGGGGTACAGCCAGAGGATGAGGCAGAATATTACTGTGTTCTATGGTACAGCAACCGCTGGGTGTTCGGTGGAGGAACCAAACTGACTGTCCTA

SEQ ID NO: 118 - protein, 249 aa, Artificial Sequence
  Synthetic polypeptide
EVQLVESGGGLVQPGGSLKLSCAASGFTFNSYAMNWVRQAPGKGLEWVARIRSKYNNYATYYADSVKGRFTISRDDSKNTAYLQMNNLKTEDTAVYYCVRHGNFGNSYVSWWAYWGQGTLVTVSSGGGGSGGGGSGGGGSQTVVTQEPSLTVSPGGTVTLTCGSSTGAVTSGNYPNWVQQKPGQAPRGLIGGTKFLAPGTPARFSGSLLGGKAALTLSGVQPEDEAEYYCVLWYSNRWVFGGGTKLTVL

SEQ ID NO: 119 - protein, 747 aa, Artificial Sequence
  Synthetic polypeptide
GAGGTGCAGCTGGTCGAGTCTGGAGGAGGATTGGTGCAGCCTGGAGGGTCATTGAAACTCTCATGTGCAGCCTCTGGATTCACCTTCAATAGCTACGCCATGAACTGGGTCCGCCAGGCTCCAGGAAAGGGTTTGGAATGGGTTGCTCGCATAAGAAGTAAATATAATAATTATGCAACATATTATGCCGATTCAGTGAAAGGCAGGTTCACCATCTCCAGAGATGATTCAAAAAACACTGCCTATCTACAAATGAACAACTTGAAAACTGAGGACACTGCCGTGTACTACTGTGTGAGACATGGGAACTTCGGTAATAGCTACGTTTCCTGGTGGGCTTACTGGGGCCAAGGGACTCTGGTCACCGTCTCCTCAGGTGGTGGTGGTTCTGGCGGCGGCGGCTCCGGTGGTGGTGGTTCTCAGACTGTTGTGACTCAGGAACCTTCACTCACCGTATCACCTGGTGGAACAGTCACACTCACTTGTGGCTCCTCGACTGGGGCTGTTACATCTGGCAACTACCCAAACTGGGTCCAACAAAAACCAGGTCAGGCACCCCGTGGTCTAATAGGTGGGACTAAGTTCCTCGCCCCCGGTACTCCTGCCAGATTCTCAGGCTCCCTGCTTGGAGGCAAGGCTGCCCTCACCCTCTCAGGGGTACAGCCAGAGGATGAGGCAGAATATTACTGTGTTCTATGGTACAGCAACCGCTGGGTGTTCGGTGGAGGAACCAAACTGACTGTCCTA

SEQ ID NO: 120 - protein, 14 aa, Artificial Sequence
  Synthetic polypeptide
GSSTGAVTSGNYPN

SEQ ID NO: 121 - protein, 7 aa, Artificial Sequence
  Synthetic polypeptide
GTKFLAP

SEQ ID NO: 122 - protein, 9 aa, Artificial Sequence
  Synthetic polypeptide
VLWYSNRWV

SEQ ID NO: 123 - protein, 5 aa, Artificial Sequence
  Synthetic polypeptide
KYAMN

SEQ ID NO: 124 - protein, 19 aa, Artificial Sequence
  Synthetic polypeptide
RIRSKYNNYATYYADSVKD

SEQ ID NO: 125 - protein, 14 aa, Artificial Sequence
  Synthetic polypeptide
HGNFGNSYISYWAY

SEQ ID NO: 126 - protein, 125 aa, Artificial Sequence; identical to SEQ ID NO: 30
  Synthetic polypeptide

SEQ ID NO: 127 - protein, 375 aa, Artificial Sequence; identical to SEQ ID NO: 31
  Synthetic polypeptide

SEQ ID NO: 128 - protein, 109 aa, Artificial Sequence; identical to SEQ ID NO: 116
  Synthetic polypeptide

SEQ ID NO: 129 - protein, 327 aa, Artificial Sequence; identical to SEQ ID NO: 117
  Synthetic polypeptide

SEQ ID NO: 130 - protein, 249 aa, Artificial Sequence
  Synthetic polypeptide
EVQLVESGGGLVQPGGSLKLSCAASGFTFNKYAMNWVRQAPGKGLEWVARIRSKYNNYATYYADSVKDRFTISRDDSKNTAYLQMNNLKTEDTAVYYCVRHGNFGNSYISYWAYWGQGTLVTVSSGGGGSGGGGSGGGGSQTVVTQEPSLTVSPGGTVTLTCGSSTGAVTSGNYPNWVQQKPGQAPRGLIGGTKFLAPGTPARFSGSLLGGKAALTLSGVQPEDEAEYYCVLWYSNRWVFGGGTKLTVL

SEQ ID NO: 131 - protein, 747 aa, Artificial Sequence
  Synthetic polypeptide
GAGGTGCAGCTGGTCGAGTCTGGAGGAGGATTGGTGCAGCCTGGAGGGTCATTGAAACTCTCATGTGCAGCCTCTGGATTCACCTTCAATAAGTACGCCATGAACTGGGTCCGCCAGGCTCCAGGAAAGGGTTTGGAATGGGTTGCTCGCATAAGAAGTAAATATAATAATTATGCAACATATTATGCCGATTCAGTGAAAGACAGGTTCACCATCTCCAGAGATGATTCAAAAAACACTGCCTATCTACAAATGAACAACTTGAAAACTGAGGACACTGCCGTGTACTACTGTGTGAGACATGGGAACTTCGGTAATAGCTACATATCCTACTGGGCTTACTGGGGCCAAGGGACTCTGGTCACCGTCTCCTCAGGTGGTGGTGGTTCTGGCGGCGGCGGCTCCGGTGGTGGTGGTTCTCAGACTGTTGTGACTCAGGAACCTTCACTCACCGTATCACCTGGTGGAACAGTCACACTCACTTGTGGCTCCTCGACTGGGGCTGTTACATCTGGCAACTACCCAAACTGGGTCCAACAAAAACCAGGTCAGGCACCCCGTGGTCTAATAGGTGGGACTAAGTTCCTCGCCCCCGGTACTCCTGCCAGATTCTCAGGCTCCCTGCTTGGAGGCAAGGCTGCCCTCACCCTCTCAGGGGTACAGCCAGAGGATGAGGCAGAATATTACTGTGTTCTATGGTACAGCAACCGCTGGGTGTTCGGTGGAGGAACCAAACTGACTGTCCTA

SEQ ID NO: 132 - protein, 549 aa, Artificial Sequence
  Synthetic polypeptide
QRFVTGHFGGLYPANGGGGGSQVQLVESGGGVVQPGGSLRLSCAASGFTFSSYGMHWVRQAPGKGLEWVAFIWYDGSNKYYADSVKDRFTISRDNSKNTLYLQMNSLRAEDTAVYYCARRAGIIGTIGYYYGMDVWGQGTTVTVSSGGGGSGGGGSGGGGSSYELTQPPSVSVSPGQTASITCSGDRLGEKYTSWYQQRPGQSPLLVIYQDTKRPSGIPERFSGSNSGNTATLTISGTQAMDEADYYCQAWESSTVVFGGGTKLTVLSGGGGSEVQLVESGGGLVQPGGSLKLSCAASGFTFNKYAMNWVRQAPGKGLEWVARIRSKYNNYATYYADSVKDRFTISRDDSKNTAYLQMNNLKTEDTAVYYCVRHGNFGNSYISYWAYWGQGTLVTVSSGGGGSGGGGSGGGGSQTVVTQEPSLTVSPGGTVTLTCGSSTGAVTSGNYPNWVQQKPGQAPRGLIGGTKFLAPGTPARFSGSLLGGKAALTLSGVQPEDEAEYYCVLWYSNRWVFGGGTKLTVLGGGGSQRFCTGHFGGLHPCNGHHHHHH

SEQ ID NO: 133 - protein, 574 aa, Artificial Sequence
  Synthetic polypeptide
QRFVTGHFGGLYPANGGGGGSQVQLVESGGGVVQPGGSLRLSCAASGFTFSSYGMHWVRQAPGKGLEWVAFIWYDGSNKYYADSVKDRFTISRDNSKNTLYLQMNSLRAEDTAVYYCARRAGIIGTIGYYYGMDVWGQGTTVTVSSGGGGSGGGGSGGGGSSYELTQPPSVSVSPGQTASITCSGDRLGEKYTSWYQQRPGQSPLLVIYQDTKRPSGIPERFSGSNSGNTATLTISGTQAMDEADYYCQAWESSTVVFGGGTKLTVLSGGGGSEVQLVESGGGLVQPGGSLKLSCAASGFTFNKYAMNWVRQAPGKGLEWVARIRSKYNNYATYYADSVKDRFTISRDDSKNTAYLQMNNLKTEDTAVYYCVRHGNFGNSYISYWAYWGQGTLVTVSSGGGGSGGGGSGGGGSQTVVTQEPSLTVSPGGTVTLTCGSSTGAVTSGNYPNWVQQKPGQAPRGLIGGTKFLAPGTPARFSGSLLGGKAALTLSGVQPEDEAEYYCVLWYSNRWVFGGGTKLTVLGGGGSQRFCTGHFGGLHPCNGGGGGSGGGSRDWDFDVFGGGTPVGGHHHHHH

SEQ ID NO: 134 - protein, 549 aa, Artificial Sequence
  Synthetic polypeptide
QRFVTGHFGGLYPANGGGGGSQVQLVESGGGVVQPGGSLRLSCAASGFTFSSYGMHWVRQAPGKCLEWVAFIWYDGSNKYYADSVKDRFTISRDNSKNTLYLQMNSLRAEDTAVYYCARRAGIIGTIGYYYGMDVWGQGTTVTVSSGGGGSGGGGSGGGGSSYELTQPPSVSVSPGQTASITCSGDRLGEKYTSWYQQRPGQSPLLVIYQDTKRPSGIPERFSGSNSGNTATLTISGTQAMDEADYYCQAWESSTVVFGCGTKLTVLSGGGGSEVQLVESGGGLVQPGGSLKLSCAASGFTFNKYAMNWVRQAPGKGLEWVARIRSKYNNYATYYADSVKDRFTISRDDSKNTAYLQMNNLKTEDTAVYYCVRHGNFGNSYISYWAYWGQGTLVTVSSGGGGSGGGGSGGGGSQTVVTQEPSLTVSPGGTVTLTCGSSTGAVTSGNYPNWVQQKPGQAPRGLIGGTKFLAPGTPARFSGSLLGGKAALTLSGVQPEDEAEYYCVLWYSNRWVFGGGTKLTVLGGGGSQRFCTGHFGGLHPCNGHHHHHH

SEQ ID NO: 135 - protein, 574 aa, Artificial Sequence
  Synthetic polypeptide
QRFVTGHFGGLYPANGGGGGSQVQLVESGGGVVQPGGSLRLSCAASGFTFSSYGMHWVRQAPGKCLEWVAFIWYDGSNKYYADSVKDRFTISRDNSKNTLYLQMNSLRAEDTAVYYCARRAGIIGTIGYYYGMDVWGQGTTVTVSSGGGGSGGGGSGGGGSSYELTQPPSVSVSPGQTASITCSGDRLGEKYTSWYQQRPGQSPLLVIYQDTKRPSGIPERFSGSNSGNTATLTISGTQAMDEADYYCQAWESSTVVFGCGTKLTVLSGGGGSEVQLVESGGGLVQPGGSLKLSCAASGFTFNKYAMNWVRQAPGKGLEWVARIRSKYNNYATYYADSVKDRFTISRDDSKNTAYLQMNNLKTEDTAVYYCVRHGNFGNSYISYWAYWGQGTLVTVSSGGGGSGGGGSGGGGSQTVVTQEPSLTVSPGGTVTLTCGSSTGAVTSGNYPNWVQQKPGQAPRGLIGGTKFLAPGTPARFSGSLLGGKAALTLSGVQPEDEAEYYCVLWYSNRWVFGGGTKLTVLGGGGSQRFCTGHFGGLHPCNGGGGGSGGGSRDWDFDVFGGGTPVGGHHHHHH

SEQ ID NO: 136 - protein, 507 aa, Artificial Sequence
  Synthetic polypeptide
QVQLVESGGGVVQPGGSLRLSCAASGFTFSSYGMHWVRQAPGKGLEWVAFIWYDGSNKYYADSVKDRFTISRDNSKNTLYLQMNSLRAEDTAVYYCARRAGIIGTIGYYYGMDVWGQGTTVTVSSGGGGSGGGGSGGGGSSYELTQPPSVSVSPGQTASITCSGDRLGEKYTSWYQQRPGQSPLLVIYQDTKRPSGIPERFSGSNSGNTATLTISGTQAMDEADYYCQAWESSTVVFGGGTKLTVLSGGGGSEVQLVESGGGLVQPGGSLKLSCAASGFTFNKYAMNWVRQAPGKGLEWVARIRSKYNNYATYYADSVKDRFTISRDDSKNTAYLQMNNLKTEDTAVYYCVRHGNFGNSYISYWAYWGQGTLVTVSSGGGGSGGGGSGGGGSQTVVTQEPSLTVSPGGTVTLTCGSSTGAVTSGNYPNWVQQKPGQAPRGLIGGTKFLAPGTPARFSGSLLGGKAALTLSGVQPEDEAEYYCVLWYSNRWVFGGGTKLTVLHHHHHH

SEQ ID NO: 137 - protein, 532 aa, Artificial Sequence
  Synthetic polypeptide
QVQLVESGGGVVQPGGSLRLSCAASGFTFSSYGMHWVRQAPGKGLEWVAFIWYDGSNKYYADSVKDRFTISRDNSKNTLYLQMNSLRAEDTAVYYCARRAGIIGTIGYYYGMDVWGQGTTVTVSSGGGGSGGGGSGGGGSSYELTQPPSVSVSPGQTASITCSGDRLGEKYTSWYQQRPGQSPLLVIYQDTKRPSGIPERFSGSNSGNTATLTISGTQAMDEADYYCQAWESSTVVFGGGTKLTVLSGGGGSEVQLVESGGGLVQPGGSLKLSCAASGFTFNKYAMNWVRQAPGKGLEWVARIRSKYNNYATYYADSVKDRFTISRDDSKNTAYLQMNNLKTEDTAVYYCVRHGNFGNSYISYWAYWGQGTLVTVSSGGGGSGGGGSGGGGSQTVVTQEPSLTVSPGGTVTLTCGSSTGAVTSGNYPNWVQQKPGQAPRGLIGGTKFLAPGTPARFSGSLLGGKAALTLSGVQPEDEAEYYCVLWYSNRWVFGGGTKLTVLGGGGSGGGSRDWDFDVFGGGTPVGGHHHHHH

SEQ ID NO: 138 - protein, 718 aa, Artificial Sequence
  Synthetic polypeptide
QVQLVESGGGVVQPGGSLRLSCAASGFTFSSYGMHWVRQAPGKGLEWVAFIWYDGSNKYYADSVKDRFTISRDNSKNTLYLQMNSLRAEDTAVYYCARRAGIIGTIGYYYGMDVWGQGTTVTVSSGGGGSGGGGSGGGGSSYELTQPPSVSVSPGQTASITCSGDRLGEKYTSWYQQRPGQSPLLVIYQDTKRPSGIPERFSGSNSGNTATLTISGTQAMDEADYYCQAWESSTVVFGGGTKLTVLSGGGGSEVQLVESGGGLVQPGGSLKLSCAASGFTFNKYAMNWVRQAPGKGLEWVARIRSKYNNYATYYADSVKDRFTISRDDSKNTAYLQMNNLKTEDTAVYYCVRHGNFGNSYISYWAYWGQGTLVTVSSGGGGSGGGGSGGGGSQTVVTQEPSLTVSPGGTVTLTCGSSTGAVTSGNYPNWVQQKPGQAPRGLIGGTKFLAPGTPARFSGSLLGGKAALTLSGVQPEDEAEYYCVLWYSNRWVFGGGTKLTVLGGGGSEEPQNLIKQNCELFEQLGEYKFQNALLVRYTKKVPQVSTPTLVEVSRNLGKVGSKCCKHPEAKRMPCAEDYLSVVLNQLCVLHEKTPVSDRVTKCCTESLVNRRPCFSALEVDETYVPKEFNAETFTFHADICTLSEKERQIKKQTALVELVKHKPKATKEQLKAVMDDFAAFVEKCCKADDKETCFAEEGKKLVAASQAALGLDYHHHHHH

SEQ ID NO: 139 - protein, 549 aa, Artificial Sequence
  Synthetic polypeptide
QRFVTGHFGGLHPANGGGGGSQVQLVESGGGVVQPGGSLRLSCAASGFTFSSYGMHWVRQAPGKGLEWVAFIWYDGSNKYYADSVKDRFTISRDNSKNTLYLQMNSLRAEDTAVYYCARRAGIIGTIGYYYGMDVWGQGTTVTVSSGGGGSGGGGSGGGGSSYELTQPPSVSVSPGQTASITCSGDRLGEKYTSWYQQRPGQSPLLVIYQDTKRPSGIPERFSGSNSGNTATLTISGTQAMDEADYYCQAWESSTVVFGGGTKLTVLSGGGGSEVQLVESGGGLVQPGGSLKLSCAASGFTFNKYAMNWVRQAPGKGLEWVARIRSKYNNYATYYADSVKDRFTISRDDSKNTAYLQMNNLKTEDTAVYYCVRHGNFGNSYISYWAYWGQGTLVTVSSGGGGSGGGGSGGGGSQTVVTQEPSLTVSPGGTVTLTCGSSTGAVTSGNYPNWVQQKPGQAPRGLIGGTKFLAPGTPARFSGSLLGGKAALTLSGVQPEDEAEYYCVLWYSNRWVFGGGTKLTVLGGGGSQRFCTGHFGGLHPCNGHHHHHH

SEQ ID NO: 140 - protein, 549 aa, Artificial Sequence
  Synthetic polypeptide
QRFVTGHFGGLHPANGGGGGSQVQLVESGGGVVQPGGSLRLSCAASGFTFSSYGMHWVRQAPGKGLEWVAFIWYDGSNKYYADSVKDRFTISRDNSKNTLYLQMNSLRAEDTAVYYCARRAGIIGTIGYYYGMDVWGQGTTVTVSSGGGGSGGGGSGGGGSSYELTQPPSVSVSPGQTASITCSGDRLGEKYTSWYQQRPGQSPLLVIYQDTKRPSGIPERFSGSNSGNTATLTISGTQAMDEADYYCQAWESSTVVFGGGTKLTVLSGGGGSEVQLVESGGGLVQPGGSLKLSCAASGFTFNKYAMNWVRQAPGKGLEWVARIRSKYNNYATYYADSVKDRFTISRDDSKNTAYLQMNNLKTEDTAVYYCVRHGNFGNSYISYWAYWGQGTLVTVSSGGGGSGGGGSGGGGSQTVVTQEPSLTVSPGGTVTLTCGSSTGAVTSGNYPNWVQQKPGQAPRGLIGGTKFLAPGTPARFSGSLLGGKAALTLSGVQPEDEAEYYCVLWYSNRWVFGGGTKLTVLGGGGSQRFVTGHFGGLHPANGHHHHHH

SEQ ID NO: 141 - protein, 549 aa, Artificial Sequence
  Synthetic polypeptide
QRFVTGHFGGLYPANGGGGGSQVQLVESGGGVVQPGGSLRLSCAASGFTFSSYGMHWVRQAPGKGLEWVAFIWYDGSNKYYADSVKDRFTISRDNSKNTLYLQMNSLRAEDTAVYYCARRAGIIGTIGYYYGMDVWGQGTTVTVSSGGGGSGGGGSGGGGSSYELTQPPSVSVSPGQTASITCSGDRLGEKYTSWYQQRPGQSPLLVIYQDTKRPSGIPERFSGSNSGNTATLTISGTQAMDEADYYCQAWESSTVVFGGGTKLTVLSGGGGSEVQLVESGGGLVQPGGSLKLSCAASGFTFNKYAMNWVRQAPGKGLEWVARIRSKYNNYATYYADSVKDRFTISRDDSKNTAYLQMNNLKTEDTAVYYCVRHGNFGNSYISYWAYWGQGTLVTVSSGGGGSGGGGSGGGGSQTVVTQEPSLTVSPGGTVTLTCGSSTGAVTSGNYPNWVQQKPGQAPRGLIGGTKFLAPGTPARFSGSLLGGKAALTLSGVQPEDEAEYYCVLWYSNRWVFGGGTKLTVLGGGGSQRFVTGHFGGLHPANGHHHHHH

SEQ ID NO: 142 - protein, 1098 aa, Artificial Sequence
  Synthetic polypeptide
QVQLVESGGGVVQPGGSLRLSCAASGFTFSSYGMHWVRQAPGKGLEWVAFIWYDGSNKYYADSVKDRFTISRDNSKNTLYLQMNSLRAEDTAVYYCARRAGIIGTIGYYYGMDVWGQGTTVTVSSGGGGSGGGGSGGGGSSYELTQPPSVSVSPGQTASITCSGDRLGEKYTSWYQQRPGQSPLLVIYQDTKRPSGIPERFSGSNSGNTATLTISGTQAMDEADYYCQAWESSTVVFGGGTKLTVLSGGGGSEVQLVESGGGLVQPGGSLKLSCAASGFTFNKYAMNWVRQAPGKGLEWVARIRSKYNNYATYYADSVKDRFTISRDDSKNTAYLQMNNLKTEDTAVYYCVRHGNFGNSYISYWAYWGQGTLVTVSSGGGGSGGGGSGGGGSQTVVTQEPSLTVSPGGTVTLTCGSSTGAVTSGNYPNWVQQKPGQAPRGLIGGTKFLAPGTPARFSGSLLGGKAALTLSGVQPEDEAEYYCVLWYSNRWVFGGGTKLTVLPGGDGSDAHKSEVAHRFKDLGEENFKALVLIAFAQYLQQCPFEDHVKLVNEVTEFAKTCVADESAENCDKSLHTLFGDKLCTVATLRETYGEMADCCAKQEPERNECFLQHKDDNPNLPRLVRPEVDVMCTAFHDNEETFLKKYLYEIARRHPYFYAPELLFFAKRYKAAFTECCQAADKAACLLPKLDELRDEGKASSAKQRLKCASLQKFGERAFKAWAVARLSQRFPKAEFAEVSKLVTDLTKVHTECCHGDLLECADDRADLAKYICENQDSISSKLKECCEKPLLEKSHCIAEVENDEMPADLPSLAADFVESKDVCKNYAEAKDVFLGMFLYEYARRHPDYSVVLLLRLAKTYETTLEKCCAAADPHECYAKVFDEFKPLVEEPQNLIKQNCELFEQLGEYKFQNALLVRYTKKVPQVSTPTLVEVSRNLGKVGSKCCKHPEAKRMPCAEDYLSVVLNQLCVLHEKTPVSDRVTKCCTESLVNRRPCFSALEVDETYVPKEFNAETFTFHADICTLSEKERQIKKQTALVELVKHKPKATKEQLKAVMDDFAAFVEKCCKADDKETCFAEEGKKLVAASQAALGLHHHHHH

SEQ ID NO: 143 - protein, 549 aa, Artificial Sequence
  Synthetic polypeptide
QRFCTGHFGGLHPCNGGGGGSQVQLVESGGGVVQPGGSLRLSCAASGFTFSSYGMHWVRQAPGKGLEWVAFIWYDGSNKYYADSVKDRFTISRDNSKNTLYLQMNSLRAEDTAVYYCARRAGIIGTIGYYYGMDVWGQGTTVTVSSGGGGSGGGGSGGGGSSYELTQPPSVSVSPGQTASITCSGDRLGEKYTSWYQQRPGQSPLLVIYQDTKRPSGIPERFSGSNSGNTATLTISGTQAMDEADYYCQAWESSTVVFGGGTKLTVLSGGGGSEVQLVESGGGLVQPGGSLKLSCAASGFTFNKYAMNWVRQAPGKGLEWVARIRSKYNNYATYYADSVKDRFTISRDDSKNTAYLQMNNLKTEDTAVYYCVRHGNFGNSYISYWAYWGQGTLVTVSSGGGGSGGGGSGGGGSQTVVTQEPSLTVSPGGTVTLTCGSSTGAVTSGNYPNWVQQKPGQAPRGLIGGTKFLAPGTPARFSGSLLGGKAALTLSGVQPEDEAEYYCVLWYSNRWVFGGGTKLTVLGGGGSQRFVTGHFGGLHPANGHHHHHH

SEQ ID NO: 144 - protein, 549 aa, Artificial Sequence
  Synthetic polypeptide
QRFCTGHFGGLHPCNGGGGGSQVQLVESGGGVVQPGGSLRLSCAASGFTFSSYGMHWVRQAPGKGLEWVAFIWYDGSNKYYADSVKDRFTISRDNSKNTLYLQMNSLRAEDTAVYYCARRAGIIGTIGYYYGMDVWGQGTTVTVSSGGGGSGGGGSGGGGSSYELTQPPSVSVSPGQTASITCSGDRLGEKYTSWYQQRPGQSPLLVIYQDTKRPSGIPERFSGSNSGNTATLTISGTQAMDEADYYCQAWESSTVVFGGGTKLTVLSGGGGSEVQLVESGGGLVQPGGSLKLSCAASGFTFNKYAMNWVRQAPGKGLEWVARIRSKYNNYATYYADSVKDRFTISRDDSKNTAYLQMNNLKTEDTAVYYCVRHGNFGNSYISYWAYWGQGTLVTVSSGGGGSGGGGSGGGGSQTVVTQEPSLTVSPGGTVTLTCGSSTGAVTSGNYPNWVQQKPGQAPRGLIGGTKFLAPGTPARFSGSLLGGKAALTLSGVQPEDEAEYYCVLWYSNRWVFGGGTKLTVLGGGGSQRFVTGHFGGLYPANGHHHHHH

SEQ ID NO: 145 - protein, 549 aa, Artificial Sequence
  Synthetic polypeptide
QRFCTGHFGGLHPCNGGGGGSQVQLVESGGGVVQPGGSLRLSCAASGFTFSSYGMHWVRQAPGKGLEWVAFIWYDGSNKYYADSVKDRFTISRDNSKNTLYLQMNSLRAEDTAVYYCARRAGIIGTIGYYYGMDVWGQGTTVTVSSGGGGSGGGGSGGGGSSYELTQPPSVSVSPGQTASITCSGDRLGEKYTSWYQQRPGQSPLLVIYQDTKRPSGIPERFSGSNSGNTATLTISGTQAMDEADYYCQAWESSTVVFGGGTKLTVLSGGGGSEVQLVESGGGLVQPGGSLKLSCAASGFTFNKYAMNWVRQAPGKGLEWVARIRSKYNNYATYYADSVKDRFTISRDDSKNTAYLQMNNLKTEDTAVYYCVRHGNFGNSYISYWAYWGQGTLVTVSSGGGGSGGGGSGGGGSQTVVTQEPSLTVSPGGTVTLTCGSSTGAVTSGNYPNWVQQKPGQAPRGLIGGTKFLAPGTPARFSGSLLGGKAALTLSGVQPEDEAEYYCVLWYSNRWVFGGGTKLTVLGGGGSQRFCTGHFGGLHPCNGHHHHHH

SEQ ID NO: 146 - protein, 549 aa, Artificial Sequence
  Synthetic polypeptide
QRFVTGHFGGLYPANGGGGGSQVQLVESGGGVVQPGGSLRLSCAASGFTFSSYGMHWVRQAPGKGLEWVAFIWYDGSNKYYADSVKGRFTISRDNSKNTLYLQMNSLRAEDTAVYYCARRAGIIGTIGYYYGMDVWGQGTTVTVSSGGGGSGGGGSGGGGSSYELTQPPSVSVSPGQTASITCSGDRLGEKYTSWYQQRPGQSPLLVIYQDTKRPSGIPERFSGSNSGNTATLTISGTQAMDEADYYCQAWESSTVVFGGGTKLTVLSGGGGSEVQLVESGGGLVQPGGSLKLSCAASGFTFNKYAMNWVRQAPGKGLEWVARIRSKYNNYATYYADSVKDRFTISRDDSKNTAYLQMNNLKTEDTAVYYCVRHGNFGNSYISYWAYWGQGTLVTVSSGGGGSGGGGSGGGGSQTVVTQEPSLTVSPGGTVTLTCGSSTGAVTSGNYPNWVQQKPGQAPRGLIGGTKFLAPGTPARFSGSLLGGKAALTLSGVQPEDEAEYYCVLWYSNRWVFGGGTKLTVLGGGGSQRFCTGHFGGLHPCNGHHHHHH

SEQ ID NO: 147 - protein, 546 aa, Artificial Sequence
  Synthetic polypeptide
QRFVTGHFGGLYPANGGGGGSQVQLQESGPGLVKPSQTLSLTCTVSGGSISRGGYYWSWIRQHPGKGLEWIGYIFYRGRTYYNPSLKSRVTISVDTSKNQFSLKLSSVTAADTAVYYCARVNSNYGWFDPWGQGTLVTVSSGGGGSGGGGSGGGGSEIVLTQFPGTLSLSPGERATLSCRASQSVSSSYLAWYQQKPGQAPRLLIYGASSRATGIPDRFSGSGSGTDFTLTISRLEPEDFAVYYCQQYGSSPLTFGGGTKLEIKSGGGGSEVQLVESGGGLVQPGGSLKLSCAASGFTFNKYAMNWVRQAPGKGLEWVARIRSKYNNYATYYADSVKDRFTISRDDSKNTAYLQMNNLKTEDTAVYYCVRHGNFGNSYISYWAYWGQGTLVTVSSGGGGSGGGGSGGGGSQTVVTQEPSLTVSPGGTVTLTCGSSTGAVTSGNYPNWVQQKPGQAPRGLIGGTKFLAPGTPARFSGSLLGGKAALTLSGVQPEDEAEYYCVLWYSNRWVFGGGTKLTVLGGGGSQRFCTGHFGGLHPCNGHHHHHH

SEQ ID NO: 148 - protein, 546 aa, Artificial Sequence
  Synthetic polypeptide
QRFVTGHFGGLYPANGGGGGSQVQLQESGPGLVKPSQTLSLTCTVSGGSISSGGYYWSWIRQHPGKGLEWIGYIFYRGRTYYNPSLKSRVTISVDTSKNQFSLKLSSVTAADTAVYYCARVYSNYGWFDPWGQGTLVTVSSGGGGSGGGGSGGGGSEIVLTQSPGTLSLSPGERATLSCRASQSVSSSYLAWYQQKPGQAPRLLIYGTSNRATGIPDRFSGSGSGTDFTLTISRLEPEDFAVYYCQQYGSSPLTFGGGTKLEIKSGGGGSEVQLVESGGGLVQPGGSLKLSCAASGFTFNKYAMNWVRQAPGKGLEWVARIRSKYNNYATYYADSVKDRFTISRDDSKNTAYLQMNNLKTEDTAVYYCVRHGNFGNSYISYWAYWGQGTLVTVSSGGGGSGGGGSGGGGSQTVVTQEPSLTVSPGGTVTLTCGSSTGAVTSGNYPNWVQQKPGQAPRGLIGGTKFLAPGTPARFSGSLLGGKAALTLSGVQPEDEAEYYCVLWYSNRWVFGGGTKLTVLGGGGSQRFCTGHFGGLHPCNGHHHHHH

SEQ ID NO: 149 - protein, 546 aa, Artificial Sequence
  Synthetic polypeptide
QRFVTGHFGGLYPANGGGGGSQVQLQESGPGLVKPSQTLSLTCTVSGGSISSGGYYWSWIRQHPGKGLEWIGYIFYSGRTYYNPSLKSRVTISVDTSKNQFSLKLSSVTAADTAVYYCARVYSNYGWFDPWGQGTLVTVSSGGGGSGGGGSGGGGSEIVLTQSPGTLSLSPGERATLSCRASQSVSSSYLAWYQQKPGQAPRLLIYGASSRATGIPDRFSGSGSGTDFTLTISRLEPEDFAVYYCQQYGSSPLTFGGGTKLEIKSGGGGSEVQLVESGGGLVQPGGSLKLSCAASGFTFNKYAMNWVRQAPGKGLEWVARIRSKYNNYATYYADSVKDRFTISRDDSKNTAYLQMNNLKTEDTAVYYCVRHGNFGNSYISYWAYWGQGTLVTVSSGGGGSGGGGSGGGGSQTVVTQEPSLTVSPGGTVTLTCGSSTGAVTSGNYPNWVQQKPGQAPRGLIGGTKFLAPGTPARFSGSLLGGKAALTLSGVQPEDEAEYYCVLWYSNRWVFGGGTKLTVLGGGGSQRFCTGHFGGLHPCNGHHHHHH

SEQ ID NO: 150 - protein, 546 aa, Artificial Sequence
  Synthetic polypeptide
QRFVTGHFGGLYPANGGGGGSQVQLQESGPGLVKPSQTLSLTCTVSGGSISSGGYYWSWIRQHPGKGLEWIGYIFYSGRTYYNPSLKSRVTISVDTSKNQFSLKLRSVTAADTAVYYCARVYSNYGWFDPWGQGTLVTVSSGGGGSGGGGSGGGGSEIVLTQSPGTLSLSPGERATLSCRASQSVSSSYLAWYQQKPGQAPRLLIYGASSRATGIPDRFSGSGSGTDFTLTISRLEPEDFAVYYCQQYGSSPLTFGGGTKLEIKSGGGGSEVQLVESGGGLVQPGGSLKLSCAASGFTFNKYAMNWVRQAPGKGLEWVARIRSKYNNYATYYADSVKDRFTISRDDSKNTAYLQMNNLKTEDTAVYYCVRHGNFGNSYISYWAYWGQGTLVTVSSGGGGSGGGGSGGGGSQTVVTQEPSLTVSPGGTVTLTCGSSTGAVTSGNYPNWVQQKPGQAPRGLIGGTKFLAPGTPARFSGSLLGGKAALTLSGVQPEDEAEYYCVLWYSNRWVFGGGTKLTVLGGGGSQRFCTGHFGGLHPCNGHHHHHH

SEQ ID NO: 151 - protein, 546 aa, Artificial Sequence
  Synthetic polypeptide
QRFVTGHFGGLYPANGGGGGSQVQLQESGPGLVKPSQTLSLTCTVSGGSISSGGYYWSWIRQHPGKGLEWIGYIYYSGSTFYNPSLRSRVTISVDTSKNQFSLKLSSVTAADTAVYYCARDSSSSRALDYWGQGTLVTVSSGGGGSGGGGSGGGGSEIVLTQSPGTLSLSPGERATLSCRASQSVSSSYLAWYQQKPGQAPRLLIYGASSRATGIPDRFSGSGSGTDFTLTISRLEPEDFAVYYCQQYDSSPRTFGQGTKLEIKSGGGGSEVQLVESGGGLVQPGGSLKLSCAASGFTFNKYAMNWVRQAPGKGLEWVARIRSKYNNYATYYADSVKDRFTISRDDSKNTAYLQMNNLKTEDTAVYYCVRHGNFGNSYISYWAYWGQGTLVTVSSGGGGSGGGGSGGGGSQTVVTQEPSLTVSPGGTVTLTCGSSTGAVTSGNYPNWVQQKPGQAPRGLIGGTKFLAPGTPARFSGSLLGGKAALTLSGVQPEDEAEYYCVLWYSNRWVFGGGTKLTVLGGGGSQRFCTGHFGGLHPCNGHHHHHH

SEQ ID NO: 152 - protein, 546 aa, Artificial Sequence
  Synthetic polypeptide
QRFVTGHFGGLYPANGGGGGSQVQLQESGPGLVKPSQTLSLTCTVSGGSISSGGYYWSWIRQHPGKGLEWIGYIYYRGRTYYNPSLKSRVTISVDTSKNQFSLKLSSVTAADTAVYYCARVYSNYGWFDPWGQGTLVTVSSGGGGSGGGGSGGGGSEIVLTQSPGTLSLSPGERATLSCRASQSVSSSYLAWYQQKPGQAPRLLIYGASSRATGIPDRFSGSGSGTDFTLTISRLEPEDFAVYYCQQYGSSPLTFGGGTKLEIKSGGGGSEVQLVESGGGLVQPGGSLKLSCAASGFTFNKYAMNWVRQAPGKGLEWVARIRSKYNNYATYYADSVKDRFTISRDDSKNTAYLQMNNLKTEDTAVYYCVRHGNFGNSYISYWAYWGQGTLVTVSSGGGGSGGGGSGGGGSQTVVTQEPSLTVSPGGTVTLTCGSSTGAVTSGNYPNWVQQKPGQAPRGLIGGTKFLAPGTPARFSGSLLGGKAALTLSGVQPEDEAEYYCVLWYSNRWVFGGGTKLTVLGGGGSQRFCTGHFGGLHPCNGHHHHHH

SEQ ID NO: 153 - protein, 545 aa, Artificial Sequence
  Synthetic polypeptide
QRFVTGHFGGLYPANGGGGGSQVQLQESGPGLVKPSETLSLTCTVSGGSISSGGYYWSWIRQHPGKGLEWIGYIFYRGRTYYNPSLKSRVTISVDTSKNQFSLKLSSVTAADTAVYYCARVYSNYGWFDPWGQGTLVTVSSGGGGSGGGGSGGGGSEIVLTQSPGTLSLSPGERATLSCRASQSVSSSYLAWYQQKPGQAPRLLIYGASSRATGIPDRFSGSGSGTDFTLTISRLEPEDFAVYYCQQYGSSPTFGGGTKVEIKSGGGGSEVQLVESGGGLVQPGGSLKLSCAASGFTFNKYAMNWVRQAPGKGLEWVARIRSKYNNYATYYADSVKDRFTISRDDSKNTAYLQMNNLKTEDTAVYYCVRHGNFGNSYISYWAYWGQGTLVTVSSGGGGSGGGGSGGGGSQTVVTQEPSLTVSPGGTVTLTCGSSTGAVTSGNYPNWVQQKPGQAPRGLIGGTKFLAPGTPARFSGSLLGGKAALTLSGVQPEDEAEYYCVLWYSNRWVFGGGTKLTVLGGGGSQRFCTGHFGGLHPCNGHHHHHH

SEQ ID NO: 154 - protein, 546 aa, Artificial Sequence
  Synthetic polypeptide
QRFVTGHFGGLYPANGGGGGSQVQLQESGPGLVKPSQTLSLTCTVSGGSISSGGYYWSWIRQHPGKGLEWIGYIFYRGRTYYNPSLKSRVTISVDTSKNQFSLKLSSVTAADTAVYYCARVYSNYGWFDPWGQGTLVTVSSGGGGSGGGGSGGGGSEIVLTQSPGTLSLSPGERATLSCRASQSVSSSYLAWYQQKPGQAPRLLIYGASSRATGIPDRFSGSGSGTDFTLTISRLEPEDFAVYYCQQYGSSPLTFGGGTKVEIKSGGGGSEVQLVESGGGLVQPGGSLKLSCAASGFTFNKYAMNWVRQAPGKGLEWVARIRSKYNNYATYYADSVKDRFTISRDDSKNTAYLQMNNLKTEDTAVYYCVRHGNFGNSYISYWAYWGQGTLVTVSSGGGGSGGGGSGGGGSQTVVTQEPSLTVSPGGTVTLTCGSSTGAVTSGNYPNWVQQKPGQAPRGLIGGTKFLAPGTPARFSGSLLGGKAALTLSGVQPEDEAEYYCVLWYSNRWVFGGGTKLTVLGGGGSQRFCTGHFGGLHPCNGHHHHHH

SEQ ID NO: 155 - protein, 545 aa, Artificial Sequence
  Synthetic polypeptide
QRFVTGHFGGLYPANGGGGGSQVQLQESGPGLVKPSQTLSLTCTVSGGSISSGGYYWSWIRQHPGKGLEWIGYIYYRGRTYYNPSLKSRVTISVDTSKNQFSLKLSSVTAADTAVYYCARVYSNYGWFDPWGQGTLVTVSSGGGGSGGGGSGGGGSEIVLTQSPGTLSLSPGERATLSCRASQSVSSSYLAWYQQKPGQAPRLLIYGASSRATGIPDRFSGSGSGTDFTLTISRLEPEDFAVYYCQQYGSSPTFGPGTKVEIKSGGGGSEVQLVESGGGLVQPGGSLKLSCAASGFTFNKYAMNWVRQAPGKGLEWVARIRSKYNNYATYYADSVKDRFTISRDDSKNTAYLQMNNLKTEDTAVYYCVRHGNFGNSYISYWAYWGQGTLVTVSSGGGGSGGGGSGGGGSQTVVTQEPSLTVSPGGTVTLTCGSSTGAVTSGNYPNWVQQKPGQAPRGLIGGTKFLAPGTPARFSGSLLGGKAALTLSGVQPEDEAEYYCVLWYSNRWVFGGGTKLTVLGGGGSQRFCTGHFGGLHPCNGHHHHHH

SEQ ID NO: 156 - protein, 545 aa, Artificial Sequence
  Synthetic polypeptide
QRFVTGHFGGLYPANGGGGGSQVQLQESGPGLVKPSQTLSLTCTVSGGSISSGGYYWSWIRQHPGKGLEWIGYIYYRGRTYYNPSLKSRVTISVDTSKNQFSLKLSSVTAADTAVYYCARVYSNYGWFDPWGQGTLVTVSSGGGGSGGGGSGGGGSEIVLTQSPGTLSLSPGERATLSCRASQSVSSSYLAWYQQKPGQAPRLLIYGASSRATGIPDRFSGSGSGTDFTLTISRLEPEDFAVYYCQQYGSSPTFGGGTKVEIKSGGGGSEVQLVESGGGLVQPGGSLKLSCAASGFTFNKYAMNWVRQAPGKGLEWVARIRSKYNNYATYYADSVKDRFTISRDDSKNTAYLQMNNLKTEDTAVYYCVRHGNFGNSYISYWAYWGQGTLVTVSSGGGGSGGGGSGGGGSQTVVTQEPSLTVSPGGTVTLTCGSSTGAVTSGNYPNWVQQKPGQAPRGLIGGTKFLAPGTPARFSGSLLGGKAALTLSGVQPEDEAEYYCVLWYSNRWVFGGGTKLTVLGGGGSQRFCTGHFGGLHPCNGHHHHHH

SEQ ID NO: 157 - protein, 545 aa, Artificial Sequence
  Synthetic polypeptide
QRFVTGHFGGLYPANGGGGGSQVQLQESGPGLVKPSQTLSLTCTISGGSISSGGYYWSWIRQHPGKGLEWIGYIFYSGRTYYNPSLKSRVTISVDTSKNQFSLKLTSVTAADTAVYYCARVNSNYGWFDPWGQGTLVTVSSGGGGSGGGGSGGGGSEIVLTQSPGTLSLSPGERATLSCRASQSVSSSYLAWYQQKPGQAPRLLIYGASSRATGIPDRFSGSGSGTDFTLTISRLEPEDFAVYYCQQYGSSPTFGGGTKVEIKSGGGGSEVQLVESGGGLVQPGGSLKLSCAASGFTFNKYAMNWVRQAPGKGLEWVARIRSKYNNYATYYADSVKDRFTISRDDSKNTAYLQMNNLKTEDTAVYYCVRHGNFGNSYISYWAYWGQGTLVTVSSGGGGSGGGGSGGGGSQTVVTQEPSLTVSPGGTVTLTCGSSTGAVTSGNYPNWVQQKPGQAPRGLIGGTKFLAPGTPARFSGSLLGGKAALTLSGVQPEDEAEYYCVLWYSNRWVFGGGTKLTVLGGGGSQRFCTGHFGGLHPCNGHHHHHH

SEQ ID NO: 158 - protein, 546 aa, Artificial Sequence
  Synthetic polypeptide
QRFVTGHFGGLYPANGGGGGSQVQLQESGPGLVKPSQTLSLTCTVSGGSISSGGYYWSWIRQHPGKGLDWIGYIFYRGRTYYNPSLKSRVTISVDTSKNQFSLKLSSVTAADTAVYYCARVNSNYGWFDPWGQGTLVTVSSGGGGSGGGGSGGGGSEIVLTQSPGTLSLSPGERATLSCRASQSVSSSYLAWYQQKPGQAPRLLIYGASSRATGIPDRFSGSGSGTDFTLTISRLEPEDFAVYYCQQYGSSPLTFGGGTKVEIKSGGGGSEVQLVESGGGLVQPGGSLKLSCAASGFTFNKYAMNWVRQAPGKGLEWVARIRSKYNNYATYYADSVKDRFTISRDDSKNTAYLQMNNLKTEDTAVYYCVRHGNFGNSYISYWAYWGQGTLVTVSSGGGGSGGGGSGGGGSQTVVTQEPSLTVSPGGTVTLTCGSSTGAVTSGNYPNWVQQKPGQAPRGLIGGTKFLAPGTPARFSGSLLGGKAALTLSGVQPEDEAEYYCVLWYSNRWVFGGGTKLTVLGGGGSQRFCTGHFGGLHPCNGHHHHHH

SEQ ID NO: 159 - protein, 545 aa, Artificial Sequence
  Synthetic polypeptide
QRFVTGHFGGLYPANGGGGGSQVQLQESGPGLVKPSQTLSLTCTVSGGSISSGGYYWSWIRQHPGKGLEWIGYIYYRGRTYYNPSLKSRVTISVDTSKNQFSLKLSSVTAADTAVYYCARVYSNYGWFDPWGQGTLVTVSSGGGGSGGGGSGGGGSEIVLTQSPGTLSLSPGERATLSCRASQSVSSSYLAWYQQKPGQAPRLLIYGASTRATGIPDRFSGSGSGTDFTLTISRLEPEDFAVYYCQQYGSSPSFGQGTKVEIKSGGGGSEVQLVESGGGLVQPGGSLKLSCAASGFTFNKYAMNWVRQAPGKGLEWVARIRSKYNNYATYYADSVKDRFTISRDDSKNTAYLQMNNLKTEDTAVYYCVRHGNFGNSYISYWAYWGQGTLVTVSSGGGGSGGGGSGGGGSQTVVTQEPSLTVSPGGTVTLTCGSSTGAVTSGNYPNWVQQKPGQAPRGLIGGTKFLAPGTPARFSGSLLGGKAALTLSGVQPEDEAEYYCVLWYSNRWVFGGGTKLTVLGGGGSQRFCTGHFGGLHPCNGHHHHHH

SEQ ID NO: 160 - protein, 546 aa, Artificial Sequence
  Synthetic polypeptide
QRFVTGHFGGLYPANGGGGGSQVQLQESGPGLVRPSQTLSLTCTVSGGSISSGGYYWSWIRQHPGKGLEWIGYIYYRGRTYYNPSLKSRVTISVDTSKNQFSLKLSSVTAADTAVYYCARVYSNYGWFDPWGQGTLVTVSSGGGGSGGGGSGGGGSEIVLTQSPGTLSLSPGERATLSCRASQSVSSSYLAWYQQKPGQAPRLLIYGASSRATGIPDRFSGSGSGTDFTLTISRLEPEDFAVYYCQQYDTSPLTFGGGTKVEIKSGGGGSEVQLVESGGGLVQPGGSLKLSCAASGFTFNKYAMNWVRQAPGKGLEWVARIRSKYNNYATYYADSVKDRFTISRDDSKNTAYLQMNNLKTEDTAVYYCVRHGNFGNSYISYWAYWGQGTLVTVSSGGGGSGGGGSGGGGSQTVVTQEPSLTVSPGGTVTLTCGSSTGAVTSGNYPNWVQQKPGQAPRGLIGGTKFLAPGTPARFSGSLLGGKAALTLSGVQPEDEAEYYCVLWYSNRWVFGGGTKLTVLGGGGSQRFCTGHFGGLHPCNGHHHHHH

SEQ ID NO: 161 - protein, 545 aa, Artificial Sequence; identical to SEQ ID NO: 156
  Synthetic polypeptide

SEQ ID NO: 162 - protein, 546 aa, Artificial Sequence
  Synthetic polypeptide
QRFVTGHFGGLYPANGGGGGSQVQLQESGPGLVKPSQTLSLTCTVSGGSISSGGYYWSWIRQHPGKGLEWIGYIYYRGRTYYNPSLKSRVTISVDTSKNQFSLKLSSVTAADTAVYYCARVYSNYGWFDPWGQGTLVTVSSGGGGSGGGGSGGGGSEIVLTQSPGTLSLSPGERATLSCRASQSVSSSYLAWYQQKPGQAPRLLIYGASSRATGIPDRFSGSGSGTDFTLTISRLEPEDFAVYYCQQYGSSPLTFGGGTKVEIKSGGGGSEVQLVESGGGLVQPGGSLKLSCAASGFTFNKYAMNWVRQAPGKGLEWVARIRSKYNNYATYYADSVKDRFTISRDDSKNTAYLQMNNLKTEDTAVYYCVRHGNFGNSYISYWAYWGQGTLVTVSSGGGGSGGGGSGGGGSQTVVTQEPSLTVSPGGTVTLTCGSSTGAVTSGNYPNWVQQKPGQAPRGLIGGTKFLAPGTPARFSGSLLGGKAALTLSGVQPEDEAEYYCVLWYSNRWVFGGGTKLTVLGGGGSQRFCTGHFGGLHPCNGHHHHHH

SEQ ID NO: 163 - protein, 546 aa, Artificial Sequence
  Synthetic polypeptide
QRFVTGHFGGLYPANGGGGGSQVQLQESGPGLVKPSQTLSLTCTVSGGSISSGGYYWSWVRQHPGKGLEWIGYIFYSGRTYYNPSLKSRVIISVDTSKNQFSLKLSSVTAADTAVYYCARVYSNYGWFDPWGQGTLVTVSSGGGGSGGGGSGGGGSEIVLTQSPGTLSLSPGERATLSCRASQSVSSSYLAWYQQKPGQAPRLLIYGASSRATGIPDRFSGSGSGTDFTLTISRLEPEDFAVYYCQQYGSSPLTFGGGTKVEIKSGGGGSEVQLVESGGGLVQPGGSLKLSCAASGFTFNKYAMNWVRQAPGKGLEWVARIRSKYNNYATYYADSVKDRFTISRDDSKNTAYLQMNNLKTEDTAVYYCVRHGNFGNSYISYWAYWGQGTLVTVSSGGGGSGGGGSGGGGSQTVVTQEPSLTVSPGGTVTLTCGSSTGAVTSGNYPNWVQQKPGQAPRGLIGGTKFLAPGTPARFSGSLLGGKAALTLSGVQPEDEAEYYCVLWYSNRWVFGGGTKLTVLGGGGSQRFCTGHFGGLHPCNGHHHHHH

SEQ ID NO: 164 - protein, 546 aa, Artificial Sequence
  Synthetic polypeptide
QRFVTGHFGGLYPANGGGGGSQVQLQESGPGLVKPSQTLSLTCTVSGGSISSGGYYWSWIRQHPGKGLEWIGYIFYSGRTYYNPSLKSRVTISVDTSKNQFSLKLSSVTAADTAVYYCARVYSNYGWFDPWGQGTLVTVSSGGGGSGGGGSGGGGSEIVLTQSPGTLSLSPGERATLSCRASQSVSSSYLAWYQQKPGQAPRLLIYGASSRATGIPDRFSGSGSGTDFTLTISRLEPEDFAVYYCQQYGSSPLTFGGGTKVEIKSGGGGSEVQLVESGGGLVQPGGSLKLSCAASGFTFNKYAMNWVRQAPGKGLEWVARIRSKYNNYATYYADSVKDRFTISRDDSKNTAYLQMNNLKTEDTAVYYCVRHGNFGNSYISYWAYWGQGTLVTVSSGGGGSGGGGSGGGGSQTVVTQEPSLTVSPGGTVTLTCGSSTGAVTSGNYPNWVQQKPGQAPRGLIGGTKFLAPGTPARFSGSLLGGKAALTLSGVQPEDEAEYYCVLWYSNRWVFGGGTKLTVLGGGGSQRFCTGHFGGLHPCNGHHHHHH

SEQ ID NO: 165 - protein, 546 aa, Artificial Sequence
  Synthetic polypeptide
QRFVTGHFGGLYPANGGGGGSQVQLQESGPGLVKPSQTLSLTCTVSGGSISSGGYYWSWIRQHPGKGLEWIGYIFYSGRTYYNPSLKSRVSISVDTSKNQFSLKLSSVTAADTAVYYCARVYSNYGWFDPWGQGTLVTVSSGGGGSGGGGSGGGGSEIVLTQSPGTLSLSPGERATLSCRASQSVSSSYLAWYQQKPGQAPRLLIYGASSRATGIPDRFSGSGSGTDFTLTISRLEPEDFAVYYCQQYGSSPLTFGGGTKVEIKSGGGGSEVQLVESGGGLVQPGGSLKLSCAASGFTFNKYAMNWVRQAPGKGLEWVARIRSKYNNYATYYADSVKDRFTISRDDSKNTAYLQMNNLKTEDTAVYYCVRHGNFGNSYISYWAYWGQGTLVTVSSGGGGSGGGGSGGGGSQTVVTQEPSLTVSPGGTVTLTCGSSTGAVTSGNYPNWVQQKPGQAPRGLIGGTKFLAPGTPARFSGSLLGGKAALTLSGVQPEDEAEYYCVLWYSNRWVFGGGTKLTVLGGGGSQRFCTGHFGGLHPCNGHHHHHH

SEQ ID NO: 166 - protein, 546 aa, Artificial Sequence
  Synthetic polypeptide
QRFVTGHFGGLYPANGGGGGSQVQLQESGPGLVKPSETLSLTCTVSGGSVSSGGYYWSWIRQPPGKGLEWIGYIYYRGRTYYNPSLKSRVTISVDTSKNQFSLKLSSVTAADTAVYYCARVYSNYGWFDPWGQGTLVTVSSGGGGSGGGGSGGGGSEIVLTQSPGTLSLSPGERATLSCRASQSVSSSYLAWYQQKPGQAPRLLIYGASSRATGIPDRFSGSGSGTDFTLTISRLEPEDFAVYYCQQYGSSPLTFGGGTKVEIKSGGGGSEVQLVESGGGLVQPGGSLKLSCAASGFTFNKYAMNWVRQAPGKGLEWVARIRSKYNNYATYYADSVKDRFTISRDDSKNTAYLQMNNLKTEDTAVYYCVRHGNFGNSYISYWAYWGQGTLVTVSSGGGGSGGGGSGGGGSQTVVTQEPSLTVSPGGTVTLTCGSSTGAVTSGNYPNWVQQKPGQAPRGLIGGTKFLAPGTPARFSGSLLGGKAALTLSGVQPEDEAEYYCVLWYSNRWVFGGGTKLTVLGGGGSQRFCTGHFGGLHPCNGHHHHHH

SEQ ID NO: 167 - protein, 545 aa, Artificial Sequence
  Synthetic polypeptide
QRFVTGHFGGLYPANGGGGGSQVQLQESGPGLVKPSQTLSLTCTVSGGSISSGGYYWSWIRQHPGKGLEWIGYIYYRGRTYYNPSLKSRVTISVDTSKNQFSLKLSSVTAADTAVYYCARVYSNYGWFDPWGQGTLVTVSSGGGGSGGGGSGGGGSEIVLTQSPGTLSLSPGERATLSCRASQSVSSSYLAWYQQKPGQAPRLLIYGASSRATGIPDRFSGSGSGTDFTLTISRLEPEDFAVYYCQQYGSSPTFGQGTRLEIKSGGGGSEVQLVESGGGLVQPGGSLKLSCAASGFTFNKYAMNWVRQAPGKGLEWVARIRSKYNNYATYYADSVKDRFTISRDDSKNTAYLQMNNLKTEDTAVYYCVRHGNFGNSYISYWAYWGQGTLVTVSSGGGGSGGGGSGGGGSQTVVTQEPSLTVSPGGTVTLTCGSSTGAVTSGNYPNWVQQKPGQAPRGLIGGTKFLAPGTPARFSGSLLGGKAALTLSGVQPEDEAEYYCVLWYSNRWVFGGGTKLTVLGGGGSQRFCTGHFGGLHPCNGHHHHHH

SEQ ID NO: 168 - protein, 546 aa, Artificial Sequence
  Synthetic polypeptide
QRFVTGHFGGLYPANGGGGGSQVQLQESGPGLVKPSQTLSLTCTVSGGSISSGGYYWSWIRQHPGKGLEWIGYIFYSGKTYYNPSLKSRVSISVDTSKNQFSLKLSSVTAADTAVYYCARVYSNYGWFDPWGQGTLVTVSSGGGGSGGGGSGGGGSEIVLTQSPGTLSLSPGERATLSCRASQSVSSSYLAWYQQKPGQAPRLLIYGASSRATGIPDRFSGSGSGTDFTLTISRLEPEDFAVYYCQQYGSSPITFGQGTRLEIKSGGGGSEVQLVESGGGLVQPGGSLKLSCAASGFTFNKYAMNWVRQAPGKGLEWVARIRSKYNNYATYYADSVKDRFTISRDDSKNTAYLQMNNLKTEDTAVYYCVRHGNFGNSYISYWAYWGQGTLVTVSSGGGGSGGGGSGGGGSQTVVTQEPSLTVSPGGTVTLTCGSSTGAVTSGNYPNWVQQKPGQAPRGLIGGTKFLAPGTPARFSGSLLGGKAALTLSGVQPEDEAEYYCVLWYSNRWVFGGGTKLTVLGGGGSQRFCTGHFGGLHPCNGHHHHHH

SEQ ID NO: 169 - protein, 551 aa, Artificial Sequence
  Synthetic polypeptide
QRFVTGHFGGLYPANGGGGGSQVQLQESGPGLVKPSETLSLTCTVSGGSISSYYWSWIRQPPGKGLEWIGYIYYSGSTNYNPSLKSRVTMSIDTSKNQFSLKLISVTAADTAVYYCARDQRRIVAAGGYYYGMDVWGQGTTVTVSSGGGGSGGGGSGGGGSEIVLTQSPGTLSLSPGERATLSCRASQSVSSSYLAWYQQKPGQAPRLLIYGASTRATGIPARFSGSGSGTDFTLTISRLEPEDFAVYYCQQYGSSPFTFGPGTKVDIKSGGGGSEVQLVESGGGLVQPGGSLKLSCAASGFTFNKYAMNWVRQAPGKGLEWVARIRSKYNNYATYYADSVKDRFTISRDDSKNTAYLQMNNLKTEDTAVYYCVRHGNFGNSYISYWAYWGQGTLVTVSSGGGGSGGGGSGGGGSQTVVTQEPSLTVSPGGTVTLTCGSSTGAVTSGNYPNWVQQKPGQAPRGLIGGTKFLAPGTPARFSGSLLGGKAALTLSGVQPEDEAEYYCVLWYSNRWVFGGGTKLTVLGGGGSQRFCTGHFGGLHPCNGHHHHHH

SEQ ID NO: 170 - protein, 545 aa, Artificial Sequence
  Synthetic polypeptide
QRFVTGHFGGLYPANGGGGGSQVQLQESGPGLVKPSQTLSLTCTVSGGSISSNDYYWSWIRQHPGKGLEWIGYIYYSGSTFYNPSLKSRGAISVDTSKNQFSLKLTSVTAADTAVYYCARGVYRTGAFDIWGQGTMVTVSSGGGGSGGGGSGGGGSDIQMTQSPSSLSASVGDRVTITCRASQSISSYLNWYQQKPGKAPKSLIYAASSLQSGVPSKFSGSGSGTDFTLTISSLQPEDIATYYCQQSYSTPQAFGGGTKVDIKSGGGGSEVQLVESGGGLVQPGGSLKLSCAASGFTFNKYAMNWVRQAPGKGLEWVARIRSKYNNYATYYADSVKDRFTISRDDSKNTAYLQMNNLKTEDTAVYYCVRHGNFGNSYISYWAYWGQGTLVTVSSGGGGSGGGGSGGGGSQTVVTQEPSLTVSPGGTVTLTCGSSTGAVTSGNYPNWVQQKPGQAPRGLIGGTKFLAPGTPARFSGSLLGGKAALTLSGVQPEDEAEYYCVLWYSNRWVFGGGTKLTVLGGGGSQRFCTGHFGGLHPCNGHHHHHH

SEQ ID NO: 171 - protein, 546 aa, Artificial Sequence
  Synthetic polypeptide
QRFVTGHFGGLYPANGGGGGSQVQLVQSGAEVKKPGASVKVSCKASGYTFTYYGISWVRQAPGQGLEWMGWINPYGGETNYAQKLQGRVTMTTDTSTSTAYMELRSLRSDDTAVYYCARGSGGFDYWGQGTLVTVSSGGGGSGGGGSGGGGSDIVMTQTPLSLSVTPGEPASISCRSSQSLLHSNGYNYLDWYLQKPGQSPQLLIYLGSYRASGVPDRFSGSGSGTDFTLKISRVEAEDVGVYYCMQALQTPFTFGPGTKVDIKSGGGGSEVQLVESGGGLVQPGGSLKLSCAASGFTFNKYAMNWVRQAPGKGLEWVARIRSKYNNYATYYADSVKDRFTISRDDSKNTAYLQMNNLKTEDTAVYYCVRHGNFGNSYISYWAYWGQGTLVTVSSGGGGSGGGGSGGGGSQTVVTQEPSLTVSPGGTVTLTCGSSTGAVTSGNYPNWVQQKPGQAPRGLIGGTKFLAPGTPARFSGSLLGGKAALTLSGVQPEDEAEYYCVLWYSNRWVFGGGTKLTVLGGGGSQRFCTGHFGGLHPCNGHHHHHH

SEQ ID NO: 172 - protein, 546 aa, Artificial Sequence
  Synthetic polypeptide
QRFVTGHFGGLYPANGGGGGSQVQLVQSGAEVKKPGASVKVSCKASGYTFTYYGISWVRQAPGQGLEWMGWINPYSGATNYAQKLQGRVTMTTDTSTSTAYMELRSLRSDDTAVYYCARGSGGFDYWGQGTLVTVSSGGGGSGGGGSGGGGSDIVMTQTPLSLSVTPGEPASISCRSSQSLLHSNGYNYLDWYLQKPGQSPQLLIYLGSYRASGVPDRFSGSGSGTDFTLKISRVEAEDVGVYYCMQALQTPFTFGPGTKVDIKSGGGGSEVQLVESGGGLVQPGGSLKLSCAASGFTFNKYAMNWVRQAPGKGLEWVARIRSKYNNYATYYADSVKDRFTISRDDSKNTAYLQMNNLKTEDTAVYYCVRHGNFGNSYISYWAYWGQGTLVTVSSGGGGSGGGGSGGGGSQTVVTQEPSLTVSPGGTVTLTCGSSTGAVTSGNYPNWVQQKPGQAPRGLIGGTKFLAPGTPARFSGSLLGGKAALTLSGVQPEDEAEYYCVLWYSNRWVFGGGTKLTVLGGGGSQRFCTGHFGGLHPCNGHHHHHH

SEQ ID NO: 173 - protein, 546 aa, Artificial Sequence
  Synthetic polypeptide
QRFVTGHFGGLYPANGGGGGSQVQLVQSGAEVKKPGASVKVSCKASGYTFTYYGISWVRQAPGQGLEWMGWINPYTGKTNYAQKLQGRVTMTTDTSTSTAYMELRSLRSDDTAVYYCARGSGGFDYWGQGTLVTVSSGGGGSGGGGSGGGGSDIVMTQTPLSLSVTPGEPASISCRSSQSLLHSNGYNYLDWYLQKPGQSPQLLIYLGSYRASGVPDRFSGSGSGTDFTLKISRVEAEDVGVYYCMQALQTPFTFGPGTKVDIKSGGGGSEVQLVESGGGLVQPGGSLKLSCAASGFTFNKYAMNWVRQAPGKGLEWVARIRSKYNNYATYYADSVKDRFTISRDDSKNTAYLQMNNLKTEDTAVYYCVRHGNFGNSYISYWAYWGQGTLVTVSSGGGGSGGGGSGGGGSQTVVTQEPSLTVSPGGTVTLTCGSSTGAVTSGNYPNWVQQKPGQAPRGLIGGTKFLAPGTPARFSGSLLGGKAALTLSGVQPEDEAEYYCVLWYSNRWVFGGGTKLTVLGGGGSQRFCTGHFGGLHPCNGHHHHHH

SEQ ID NO: 174 - protein, 546 aa, Artificial Sequence
  Synthetic polypeptide
QRFVTGHFGGLYPANGGGGGSQVQLVQSGAEVKKPGASVKVSCKASGYTFTYYGISWVRQAPGQGLEWMGWINPYTGKTNYAQKLQGRVTMTTDTSTSTAYMELRSLRSDDTAVYYCARGSGGFDYWGQGTLVTVSSGGGGSGGGGSGGGGSDIVMTQTPLSLSVTPGEPASISCRSSQSLLHSVGYNYLDWYLQKPGQSPQLLIYLGSYRASGVPDRFSGSGSGTDFTLKISRVEAEDVGVYYCMQALQTPFTFGPGTKVDIKSGGGGSEVQLVESGGGLVQPGGSLKLSCAASGFTFNKYAMNWVRQAPGKGLEWVARIRSKYNNYATYYADSVKDRFTISRDDSKNTAYLQMNNLKTEDTAVYYCVRHGNFGNSYISYWAYWGQGTLVTVSSGGGGSGGGGSGGGGSQTVVTQEPSLTVSPGGTVTLTCGSSTGAVTSGNYPNWVQQKPGQAPRGLIGGTKFLAPGTPARFSGSLLGGKAALTLSGVQPEDEAEYYCVLWYSNRWVFGGGTKLTVLGGGGSQRFCTGHFGGLHPCNGHHHHHH

SEQ ID NO: 175 - protein, 546 aa, Artificial Sequence
  Synthetic polypeptide
QRFVTGHFGGLYPANGGGGGSQVQLVQSGAEVKKPGASVKVSCKASGYTFTSYGISWVRQAPGQGLEWMGWINPYTGNRNYAQKVQDRVTMTTDTSTNTAYMELSSLRSDDTAVYYCARGSGGFDYWGQGTLVTVSSGGGGSGGGGSGGGGSDIVMTQSPLSLPVTLGQPASISCRSSQSLLHSVGYNYLDWYLQKPGQSPQLLIYLGSNRASGVPDRFSGSGSGTDFTLKISRVEAEDVGVYYCMQALQTPFTFGPGTKLEIKSGGGGSEVQLVESGGGLVQPGGSLKLSCAASGFTFNKYAMNWVRQAPGKGLEWVARIRSKYNNYATYYADSVKDRFTISRDDSKNTAYLQMNNLKTEDTAVYYCVRHGNFGNSYISYWAYWGQGTLVTVSSGGGGSGGGGSGGGGSQTVVTQEPSLTVSPGGTVTLTCGSSTGAVTSGNYPNWVQQKPGQAPRGLIGGTKFLAPGTPARFSGSLLGGKAALTLSGVQPEDEAEYYCVLWYSNRWVFGGGTKLTVLGGGGSQRFCTGHFGGLHPCNGHHHHHH

SEQ ID NO: 176 - protein, 546 aa, Artificial Sequence
  Synthetic polypeptide
QRFVTGHFGGLYPANGGGGGSQVQLVQSGAEVKKPGASVKVSCKASGYTFTYYGISWVRQAPGQGLEWMGWINPYTGKTNYAQKLQDRVTMTTDTSTNTAYMELRSLRSDDTAVYYCARGSGGFDYWGQGTLVTVSSGGGGSGGGGSGGGGSDIVMTQTPLSLPVTPGEPASISCRSSQSLLHSVGYNYLDWYLQKPGQSPQLLIYLGSNRASGVPDRFSGSGSGTDFTLKISRVEAEDVGVYYCMQALQTPFTFGPGTKVDIKSGGGGSEVQLVESGGGLVQPGGSLKLSCAASGFTFNKYAMNWVRQAPGKGLEWVARIRSKYNNYATYYADSVKDRFTISRDDSKNTAYLQMNNLKTEDTAVYYCVRHGNFGNSYISYWAYWGQGTLVTVSSGGGGSGGGGSGGGGSQTVVTQEPSLTVSPGGTVTLTCGSSTGAVTSGNYPNWVQQKPGQAPRGLIGGTKFLAPGTPARFSGSLLGGKAALTLSGVQPEDEAEYYCVLWYSNRWVFGGGTKLTVLGGGGSQRFCTGHFGGLHPCNGHHHHHH

SEQ ID NO: 177 - protein, 546 aa, Artificial Sequence
  Synthetic polypeptide
QRFVTGHFGGLYPANGGGGGSQVQLVQSGAEVKKPGASVKVSCKASGYTFTTYGISWVRQAPGQGLEWMGWINPYTGKTNYAQKLQGRVTMATDTSTSTAYMELRSLRSDDTAVYYCARGSGGFDYWGQGTLVTVSSGGGGSGGGGSGGGGSDIVMTQSPLSLPVTPGEPASISCRSSQSLLHSVGYNYLDWYLQKPGQSPQLLIYLGSNRASGVPDRFSGSGSGTDFTLKISRVEAEDVGVYYCMQALQTPFTFGPGTKLEIKSGGGGSEVQLVESGGGLVQPGGSLKLSCAASGFTFNKYAMNWVRQAPGKGLEWVARIRSKYNNYATYYADSVKDRFTISRDDSKNTAYLQMNNLKTEDTAVYYCVRHGNFGNSYISYWAYWGQGTLVTVSSGGGGSGGGGSGGGGSQTVVTQEPSLTVSPGGTVTLTCGSSTGAVTSGNYPNWVQQKPGQAPRGLIGGTKFLAPGTPARFSGSLLGGKAALTLSGVQPEDEAEYYCVLWYSNRWVFGGGTKLTVLGGGGSQRFCTGHFGGLHPCNGHHHHHH

SEQ ID NO: 178 - protein, 546 aa, Artificial Sequence
  Synthetic polypeptide
QRFVTGHFGGLYPANGGGGGSQVQLVQSGAEVKEPGASVKVSCKASGYTFTYYGISWVRQAPGQGLEWMGWINPYTGNRNYAQKVQDRVTMTTDTSTNTAYMELRSLRSDDTAVYYCARGSGGFDYWGQGTLVTVSSGGGGSGGGGSGGGGSDIVMTQSPLSLPVTPGEPASISCRSSQSLLHSVGYNYLDWYLQKPGQSPQLLIYLGSNRASGVPDRFSGSGSGTDFTLKISRVEAEDVGVYYCMQALQTPFTFGPGTKLEIKSGGGGSEVQLVESGGGLVQPGGSLKLSCAASGFTFNKYAMNWVRQAPGKGLEWVARIRSKYNNYATYYADSVKDRFTISRDDSKNTAYLQMNNLKTEDTAVYYCVRHGNFGNSYISYWAYWGQGTLVTVSSGGGGSGGGGSGGGGSQTVVTQEPSLTVSPGGTVTLTCGSSTGAVTSGNYPNWVQQKPGQAPRGLIGGTKFLAPGTPARFSGSLLGGKAALTLSGVQPEDEAEYYCVLWYSNRWVFGGGTKLTVLGGGGSQRFCTGHFGGLHPCNGHHHHHH

SEQ ID NO: 179 - protein, 546 aa, Artificial Sequence
  Synthetic polypeptide
QRFVTGHFGGLYPANGGGGGSQVQLVQSGAEVKKPGASVKVSCKASGYTFTYYGISWVRQAPGQGLEWMGWINPYTGKTNYAQKLQGRVTMTTDTSTSTAYMELRSLRSDDTAVYYCARGSGGFDYWGQGTLVTVSSGGGGSGGGGSGGGGSDIVMTQSPLSLPVTPGEPASISCRSSQSLLHSVGYNYLDWYLQKPGQSPQLLIYLGSNRASGVPDRFSGSGSGTDFTLKISRVEAEDVGVYYCMQALQTPFTFGPGTKVEIKSGGGGSEVQLVESGGGLVQPGGSLKLSCAASGFTFNKYAMNWVRQAPGKGLEWVARIRSKYNNYATYYADSVKDRFTISRDDSKNTAYLQMNNLKTEDTAVYYCVRHGNFGNSYISYWAYWGQGTLVTVSSGGGGSGGGGSGGGGSQTVVTQEPSLTVSPGGTVTLTCGSSTGAVTSGNYPNWVQQKPGQAPRGLIGGTKFLAPGTPARFSGSLLGGKAALTLSGVQPEDEAEYYCVLWYSNRWVFGGGTKLTVLGGGGSQRFCTGHFGGLHPCNGHHHHHH

SEQ ID NO: 180 - protein, 546 aa, Artificial Sequence
  Synthetic polypeptide
QRFVTGHFGGLYPANGGGGGSQVQLVQSGAEVKKPGASVKVSCKASGYTFTSYGITWVRQAPGQGLEWMGWINPYTGNRNYAQKVQGRVTMTTDTSTSTAYMELRSLRSDDTAVYYCARGSGGFDYWGQGTLVTVSSGGGGSGGGGSGGGGSDIVMTQSPLSLSVTPGEPASISCRSSQSLLHSVGYNYLDWYLQKPGQSPQLLIYLGSNRASGVPDRFSGSGSGTDFTLKISRVEAEDVGVYYCMQALQTPFTFGPGTKVDIKSGGGGSEVQLVESGGGLVQPGGSLKLSCAASGFTFNKYAMNWVRQAPGKGLEWVARIRSKYNNYATYYADSVKDRFTISRDDSKNTAYLQMNNLKTEDTAVYYCVRHGNFGNSYISYWAYWGQGTLVTVSSGGGGSGGGGSGGGGSQTVVTQEPSLTVSPGGTVTLTCGSSTGAVTSGNYPNWVQQKPGQAPRGLIGGTKFLAPGTPARFSGSLLGGKAALTLSGVQPEDEAEYYCVLWYSNRWVFGGGTKLTVLGGGGSQRFCTGHFGGLHPCNGHHHHHH

SEQ ID NO: 181 - protein, 546 aa, Artificial Sequence
  Synthetic polypeptide
QRFVTGHFGGLYPANGGGGGSQVQLVQSGAEVKKPGASVKVSCKASGYTFTSYGISWVRQAPGQGLEWMGWINPYTGNRNYAQKFQGRVTMTTDTSTNTAYMELSSLRSEDTAVYYCARGSGGFDYWGQGTLVTVSSGGGGSGGGGSGGGGSDIVMTQSPLSLPVTPGEPASISCRSSQSLLHSVGYNYLDWYLQKPGQSPQLLIYLGSNRASGVPDRFSGSGSGTDFTLKISRVEAEDVGVYYCMQALQTPFTFGPGTKVDIKSGGGGSEVQLVESGGGLVQPGGSLKLSCAASGFTFNKYAMNWVRQAPGKGLEWVARIRSKYNNYATYYADSVKDRFTISRDDSKNTAYLQMNNLKTEDTAVYYCVRHGNFGNSYISYWAYWGQGTLVTVSSGGGGSGGGGSGGGGSQTVVTQEPSLTVSPGGTVTLTCGSSTGAVTSGNYPNWVQQKPGQAPRGLIGGTKFLAPGTPARFSGSLLGGKAALTLSGVQPEDEAEYYCVLWYSNRWVFGGGTKLTVLGGGGSQRFCTGHFGGLHPCNGHHHHHH

SEQ ID NO: 182 - protein, 546 aa, Artificial Sequence
  Synthetic polypeptide
QRFVTGHFGGLYPANGGGGGSQVQLVQSGAEVKKPGASVKVSCKASGYSFTSYGISWVRQAPGQGLEWMGWINPYTGNRNYAQKVQGRVTMTTDTSTSTAYMELRSLRSDDTAVYYCARGSGGFDYWGQGTLVTVSSGGGGSGGGGSGGGGSDIVMTQSPLSLPVTPGEPASISCRSSQSLLHSVGYNYLDWYLQKPGQSPQLLIYLGSNRASGVPDRFSGSGSGTDFTLKISRVEAEDVGVYYCMQALQTPFTFGPGTKVEIKSGGGGSEVQLVESGGGLVQPGGSLKLSCAASGFTFNKYAMNWVRQAPGKGLEWVARIRSKYNNYATYYADSVKDRFTISRDDSKNTAYLQMNNLKTEDTAVYYCVRHGNFGNSYISYWAYWGQGTLVTVSSGGGGSGGGGSGGGGSQTVVTQEPSLTVSPGGTVTLTCGSSTGAVTSGNYPNWVQQKPGQAPRGLIGGTKFLAPGTPARFSGSLLGGKAALTLSGVQPEDEAEYYCVLWYSNRWVFGGGTKLTVLGGGGSQRFCTGHFGGLHPCNGHHHHHH

SEQ ID NO: 183 - protein, 546 aa, Artificial Sequence
  Synthetic polypeptide
QRFVTGHFGGLYPANGGGGGSQVQLVQSGAEVKKPGASVKVSCKASGYTFTYYGISWVRQAPGQGLEWMGWINPYTGKTNYAQKVQGRVTMTTDTSTSTAYMELRNLRSDDTAVYYCARGSGGFDYWGQGTLVTVSSGGGGSGGGGSGGGGSDIVMTQTPLSLSVTPGQPASISCRSSQSLLHSVGYNYLDWYLQKPGQSPQLLIYLGSNRASGVPDRFSGSGSGTDFTLKISRVEAEDVGVYYCMQALQTPFTFGPGTKVDIKSGGGGSEVQLVESGGGLVQPGGSLKLSCAASGFTFNKYAMNWVRQAPGKGLEWVARIRSKYNNYATYYADSVKDRFTISRDDSKNTAYLQMNNLKTEDTAVYYCVRHGNFGNSYISYWAYWGQGTLVTVSSGGGGSGGGGSGGGGSQTVVTQEPSLTVSPGGTVTLTCGSSTGAVTSGNYPNWVQQKPGQAPRGLIGGTKFLAPGTPARFSGSLLGGKAALTLSGVQPEDEAEYYCVLWYSNRWVFGGGTKLTVLGGGGSQRFCTGHFGGLHPCNGHHHHHH

SEQ ID NO: 184 - protein, 546 aa, Artificial Sequence
  Synthetic polypeptide
QRFVTGHFGGLYPANGGGGGSQVQLVQSGAEVKKPGASVKVSCKASGYTFTYYGISWVRQAPGQGLEWMGWINPYTGKTNYAQKLQGRVTMTTDTSTSTAYMELRSLRSDDTAVYYCARGSGGFDYWGQGTLVTVSSGGGGSGGGGSGGGGSDIVMTQTPLSLSVTPGQPASISCRSSQSLLHSVGYNYLDWYLQKPGQSPQLLIYLGSNRASGVPDRFSGSGSGTDFTLKISRVEAEDVGVYYCMQALQTPFTFGPGTKVDIKSGGGGSEVQLVESGGGLVQPGGSLKLSCAASGFTFNKYAMNWVRQAPGKGLEWVARIRSKYNNYATYYADSVKDRFTISRDDSKNTAYLQMNNLKTEDTAVYYCVRHGNFGNSYISYWAYWGQGTLVTVSSGGGGSGGGGSGGGGSQTVVTQEPSLTVSPGGTVTLTCGSSTGAVTSGNYPNWVQQKPGQAPRGLIGGTKFLAPGTPARFSGSLLGGKAALTLSGVQPEDEAEYYCVLWYSNRWVFGGGTKLTVLGGGGSQRFCTGHFGGLHPCNGHHHHHH

SEQ ID NO: 185 - protein, 550 aa, Artificial Sequence
  Synthetic polypeptide
QRFVTGHFGGLYPANGGGGGSQVQLVESGGGVVQPGRSLRLSCAASGFTFRNYAMHWVRQAPGKGLEWVAVISYSGNNKYYASSVKGRFTISRDNSKNTLYLQLNSLRAEDTAVYYCAREFYYDSTGYDYSTPGDYWGQGTLVTVSSGGGGSGGGGSGGGGSDIQMTQSPSSLSASVGDRVTITCQASQDISNYLNWYQQKPGKAPKLLIYDASNLETGVPSRFSGSGSGTDFTFTISSLQPEDIATYYCQQYDNLPTFGQGTRLEIKSGGGGSEVQLVESGGGLVQPGGSLKLSCAASGFTFNKYAMNWVRQAPGKGLEWVARIRSKYNNYATYYADSVKDRFTISRDDSKNTAYLQMNNLKTEDTAVYYCVRHGNFGNSYISYWAYWGQGTLVTVSSGGGGSGGGGSGGGGSQTVVTQEPSLTVSPGGTVTLTCGSSTGAVTSGNYPNWVQQKPGQAPRGLIGGTKFLAPGTPARFSGSLLGGKAALTLSGVQPEDEAEYYCVLWYSNRWVFGGGTKLTVLGGGGSQRFCTGHFGGLHPCNGHHHHHH

SEQ ID NO: 186 - protein, 551 aa, Artificial Sequence
  Synthetic polypeptide
QRFVTGHFGGLYPANGGGGGSQVQLVESGGGVVQPGRSLRLSCVASGFTFRNYAMHWVRQAPGKGLEWVAVISYSGNNKYYASSVKGRFTISRDNSKNTLYLQLNSLRAEDTAVYYCAREFYYDSTGYDYSTPGDYWGQGTLVTVSSGGGGSGGGGSGGGGSDIQMTQSPSSLSASVGDRVTITCRASQSISSYLNWYQQKPGKAPKLLIYDASSLQSGVPSRFSGSGSGTEFTLTISSLQAEDVAVYYCQQYYSTPLTFGGGTKVDIKSGGGGSEVQLVESGGGLVQPGGSLKLSCAASGFTFNKYAMNWVRQAPGKGLEWVARIRSKYNNYATYYADSVKDRFTISRDDSKNTAYLQMNNLKTEDTAVYYCVRHGNFGNSYISYWAYWGQGTLVTVSSGGGGSGGGGSGGGGSQTVVTQEPSLTVSPGGTVTLTCGSSTGAVTSGNYPNWVQQKPGQAPRGLIGGTKFLAPGTPARFSGSLLGGKAALTLSGVQPEDEAEYYCVLWYSNRWVFGGGTKLTVLGGGGSQRFCTGHFGGLHPCNGHHHHHH

SEQ ID NO: 187 - protein, 551 aa, Artificial Sequence
  Synthetic polypeptide
QRFVTGHFGGLYPANGGGGGSQVQLVESGGGVVQPGRSLRLSCAASGFTFRNYAMHWVRQAPGKGLEWVAGISYSGTNKYYASSVKGRFTISRDNSKNTLYLQLNSLRAEDTAVYYCAREFYYDSTGYDYSTPGDYWGQGTLVTVSSGGGGSGGGGSGGGGSDIQMTQSPSSLSASVGDRVTITCQASQDISNYLNWYQQKPGKAPKLLIYDASNLETGVPSRFSGSGSGTEFTLTISSLQPEDIATYYCQQYDNLPLTFGGGTKVDIKSGGGGSEVQLVESGGGLVQPGGSLKLSCAASGFTFNKYAMNWVRQAPGKGLEWVARIRSKYNNYATYYADSVKDRFTISRDDSKNTAYLQMNNLKTEDTAVYYCVRHGNFGNSYISYWAYWGQGTLVTVSSGGGGSGGGGSGGGGSQTVVTQEPSLTVSPGGTVTLTCGSSTGAVTSGNYPNWVQQKPGQAPRGLIGGTKFLAPGTPARFSGSLLGGKAALTLSGVQPEDEAEYYCVLWYSNRWVFGGGTKLTVLGGGGSQRFCTGHFGGLHPCNGHHHHHH

SEQ ID NO: 188 - protein, 551 aa, Artificial Sequence
  Synthetic polypeptide
QRFVTGHFGGLYPANGGGGGSQVQLVESGGGVVQPGRSLRLSCVASGFTFRNYAMHWVRQAPGKGLEWVAVISYSGNNKYYASSVKGRFTISRDNSKNTLFLQLNSLRAEDTAVYYCAREFYYDSTGYDYSTPGNYWGQGTLVTVSSGGGGSGGGGSGGGGSDIQMTQSPSSLSASVGDRVTITCQASQDISNYLNWYQQKPGKAPKLLIYDASNLETGVPSRFSGSGSGTDFTFTISSLQPEDIATYYCQQYVNLPLTFGGGTKLEIKSGGGGSEVQLVESGGGLVQPGGSLKLSCAASGFTFNKYAMNWVRQAPGKGLEWVARIRSKYNNYATYYADSVKDRFTISRDDSKNTAYLQMNNLKTEDTAVYYCVRHGNFGNSYISYWAYWGQGTLVTVSSGGGGSGGGGSGGGGSQTVVTQEPSLTVSPGGTVTLTCGSSTGAVTSGNYPNWVQQKPGQAPRGLIGGTKFLAPGTPARFSGSLLGGKAALTLSGVQPEDEAEYYCVLWYSNRWVFGGGTKLTVLGGGGSQRFCTGHFGGLHPCNGHHHHHH

SEQ ID NO: 189 - protein, 548 aa, Artificial Sequence
  Synthetic polypeptide
QRFVTGHFGGLYPANGGGGGSQVQLVESGGGVVQPGRSLRLSCAASGFTFSSYGMQWVRQAPGKGLEWVAVIWYSGSNKYYASSVKGRFTISRDNSKNTLYLQMNSLRAEDTAVYYCARDGYPIFYRYYGMDVWGQGTTVTVSSGGGGSGGGGSGGGGSDIQMTQSPSSLSASVGDRVTITCRASQGISNYLAWYQQKPGKVPKLLIYAASTLQSGVPSRFSGSGSGTDFTLTISSLQPEDVATYYCQKYNSAPLTFGGGTKVEIKSGGGGSEVQLVESGGGLVQPGGSLKLSCAASGFTFNKYAMNWVRQAPGKGLEWVARIRSKYNNYATYYADSVKDRFTISRDDSKNTAYLQMNNLKTEDTAVYYCVRHGNFGNSYISYWAYWGQGTLVTVSSGGGGSGGGGSGGGGSQTVVTQEPSLTVSPGGTVTLTCGSSTGAVTSGNYPNWVQQKPGQAPRGLIGGTKFLAPGTPARFSGSLLGGKAALTLSGVQPEDEAEYYCVLWYSNRWVFGGGTKLTVLGGGGSQRFCTGHFGGLHPCNGHHHHHH

SEQ ID NO: 190 - protein, 549 aa, Artificial Sequence
  Synthetic polypeptide
QRFVTGHFGGLYPANGGGGGSQVQLVESGGGVVQPGRSLRLSCAASGFTFSSYGMHWVRQAPGKGLEWVAVISYSGSNKYYASSVKGRFTISRDNSKNTLYLQMNSLRAEDTAVYYCARDGYPIFYRYYGMDVWGQGTTVTVSSGGGGSGGGGSGGGGSEIVLTQSPGTLSLSPGERATLSCRASQSVSSSYLAWYQQKPGQAPRLLIYGASSRATGIPDRFSGSGSGTDFTLTISRLEPEDLAVYYCQQYGTSPLTFGGGTKLEIKSGGGGSEVQLVESGGGLVQPGGSLKLSCAASGFTFNKYAMNWVRQAPGKGLEWVARIRSKYNNYATYYADSVKDRFTISRDDSKNTAYLQMNNLKTEDTAVYYCVRHGNFGNSYISYWAYWGQGTLVTVSSGGGGSGGGGSGGGGSQTVVTQEPSLTVSPGGTVTLTCGSSTGAVTSGNYPNWVQQKPGQAPRGLIGGTKFLAPGTPARFSGSLLGGKAALTLSGVQPEDEAEYYCVLWYSNRWVFGGGTKLTVLGGGGSQRFCTGHFGGLHPCNGHHHHHH

SEQ ID NO: 191 - protein, 549 aa, Artificial Sequence
  Synthetic polypeptide
QRFVTGHFGGLYPANGGGGGSQVQLVESGGGVVQPGRSLRLSCAASGFTFSSFGMHWVRQAPGKGLEWVAFIWYSGSNKYYASSVKGRVTISRDNSKNTLYLQMNSLRAEDTAVYYCARDGYPIFYYYYGMDVWGQGTTVTVSSGGGGSGGGGSGGGGSEIVLTQSPGTLSLSPGERATLSCRASQSVSSSYLAWYQQKPGQAPRLLIYGASSRATGIPDRFSGSGSGTDFTLTISRLEPEDFAVYYCQQYGSSPFTFGPGTRLEIKSGGGGSEVQLVESGGGLVQPGGSLKLSCAASGFTFNKYAMNWVRQAPGKGLEWVARIRSKYNNYATYYADSVKDRFTISRDDSKNTAYLQMNNLKTEDTAVYYCVRHGNFGNSYISYWAYWGQGTLVTVSSGGGGSGGGGSGGGGSQTVVTQEPSLTVSPGGTVTLTCGSSTGAVTSGNYPNWVQQKPGQAPRGLIGGTKFLAPGTPARFSGSLLGGKAALTLSGVQPEDEAEYYCVLWYSNRWVFGGGTKLTVLGGGGSQRFCTGHFGGLHPCNGHHHHHH

SEQ ID NO: 192 - protein, 574 aa, Artificial Sequence
  Synthetic polypeptide
QRFVTGHFGGLYPANGGGGGSQVQLVESGGGVVQPGGSLRLSCAASGFTFSSYGMHWVRQAPGKGLEWVAFIWYDGSNKYYADSVKGRFTISRDNSKNTLYLQMNSLRAEDTAVYYCARRAGIIGTIGYYYGMDVWGQGTTVTVSSGGGGSGGGGSGGGGSSYELTQPPSVSVSPGQTASITCSGDRLGEKYTSWYQQRPGQSPLLVIYQDTKRPSGIPERFSGSNSGNTATLTISGTQAMDEADYYCQAWESSTVVFGGGTKLTVLSGGGGSEVQLVESGGGLVQPGGSLKLSCAASGFTFNKYAMNWVRQAPGKGLEWVARIRSKYNNYATYYADSVKDRFTISRDDSKNTAYLQMNNLKTEDTAVYYCVRHGNFGNSYISYWAYWGQGTLVTVSSGGGGSGGGGSGGGGSQTVVTQEPSLTVSPGGTVTLTCGSSTGAVTSGNYPNWVQQKPGQAPRGLIGGTKFLAPGTPARFSGSLLGGKAALTLSGVQPEDEAEYYCVLWYSNRWVFGGGTKLTVLGGGGSQRFCTGHFGGLHPCNGGGGGSGGGSRDWDFDVFGGGTPVGGHHHHHH

SEQ ID NO: 193 - protein, 571 aa, Artificial Sequence
  Synthetic polypeptide
QRFVTGHFGGLYPANGGGGGSQVQLQESGPGLVKPSQTLSLTCTVSGGSISRGGYYWSWIRQHPGKGLEWIGYIFYRGRTYYNPSLKSRVTISVDTSKNQFSLKLSSVTAADTAVYYCARVNSNYGWFDPWGQGTLVTVSSGGGGSGGGGSGGGGSEIVLTQFPGTLSLSPGERATLSCRASQSVSSSYLAWYQQKPGQAPRLLIYGASSRATGIPDRFSGSGSGTDFTLTISRLEPEDFAVYYCQQYGSSPLTFGGGTKLEIKSGGGGSEVQLVESGGGLVQPGGSLKLSCAASGFTFNKYAMNWVRQAPGKGLEWVARIRSKYNNYATYYADSVKDRFTISRDDSKNTAYLQMNNLKTEDTAVYYCVRHGNFGNSYISYWAYWGQGTLVTVSSGGGGSGGGGSGGGGSQTVVTQEPSLTVSPGGTVTLTCGSSTGAVTSGNYPNWVQQKPGQAPRGLIGGTKFLAPGTPARFSGSLLGGKAALTLSGVQPEDEAEYYCVLWYSNRWVFGGGTKLTVLGGGGSQRFCTGHFGGLHPCNGGGGGSGGGSRDWDFDVFGGGTPVGGHHHHHH

SEQ ID NO: 194 - protein, 571 aa, Artificial Sequence
  Synthetic polypeptide
QRFVTGHFGGLYPANGGGGGSQVQLQESGPGLVKPSQTLSLTCTVSGGSISSGGYYWSWIRQHPGKGLEWIGYIFYRGRTYYNPSLKSRVTISVDTSKNQFSLKLSSVTAADTAVYYCARVYSNYGWFDPWGQGTLVTVSSGGGGSGGGGSGGGGSEIVLTQSPGTLSLSPGERATLSCRASQSVSSSYLAWYQQKPGQAPRLLIYGTSNRATGIPDRFSGSGSGTDFTLTISRLEPEDFAVYYCQQYGSSPLTFGGGTKLEIKSGGGGSEVQLVESGGGLVQPGGSLKLSCAASGFTFNKYAMNWVRQAPGKGLEWVARIRSKYNNYATYYADSVKDRFTISRDDSKNTAYLQMNNLKTEDTAVYYCVRHGNFGNSYISYWAYWGQGTLVTVSSGGGGSGGGGSGGGGSQTVVTQEPSLTVSPGGTVTLTCGSSTGAVTSGNYPNWVQQKPGQAPRGLIGGTKFLAPGTPARFSGSLLGGKAALTLSGVQPEDEAEYYCVLWYSNRWVFGGGTKLTVLGGGGSQRFCTGHFGGLHPCNGGGGGSGGGSRDWDFDVFGGGTPVGGHHHHHH

SEQ ID NO: 195 - protein, 571 aa, Artificial Sequence
  Synthetic polypeptide
QRFVTGHFGGLYPANGGGGGSQVQLQESGPGLVKPSQTLSLTCTVSGGSISSGGYYWSWIRQHPGKGLEWIGYIFYSGRTYYNPSLKSRVTISVDTSKNQFSLKLSSVTAADTAVYYCARVYSNYGWFDPWGQGTLVTVSSGGGGSGGGGSGGGGSEIVLTQSPGTLSLSPGERATLSCRASQSVSSSYLAWYQQKPGQAPRLLIYGASSRATGIPDRFSGSGSGTDFTLTISRLEPEDFAVYYCQQYGSSPLTFGGGTKLEIKSGGGGSEVQLVESGGGLVQPGGSLKLSCAASGFTFNKYAMNWVRQAPGKGLEWVARIRSKYNNYATYYADSVKDRFTISRDDSKNTAYLQMNNLKTEDTAVYYCVRHGNFGNSYISYWAYWGQGTLVTVSSGGGGSGGGGSGGGGSQTVVTQEPSLTVSPGGTVTLTCGSSTGAVTSGNYPNWVQQKPGQAPRGLIGGTKFLAPGTPARFSGSLLGGKAALTLSGVQPEDEAEYYCVLWYSNRWVFGGGTKLTVLGGGGSQRFCTGHFGGLHPCNGGGGGSGGGSRDWDFDVFGGGTPVGGHHHHHH

SEQ ID NO: 196 - protein, 571 aa, Artificial Sequence
  Synthetic polypeptide
QRFVTGHFGGLYPANGGGGGSQVQLQESGPGLVKPSQTLSLTCTVSGGSISSGGYYWSWIRQHPGKGLEWIGYIFYSGRTYYNPSLKSRVTISVDTSKNQFSLKLRSVTAADTAVYYCARVYSNYGWFDPWGQGTLVTVSSGGGGSGGGGSGGGGSEIVLTQSPGTLSLSPGERATLSCRASQSVSSSYLAWYQQKPGQAPRLLIYGASSRATGIPDRFSGSGSGTDFTLTISRLEPEDFAVYYCQQYGSSPLTFGGGTKLEIKSGGGGSEVQLVESGGGLVQPGGSLKLSCAASGFTFNKYAMNWVRQAPGKGLEWVARIRSKYNNYATYYADSVKDRFTISRDDSKNTAYLQMNNLKTEDTAVYYCVRHGNFGNSYISYWAYWGQGTLVTVSSGGGGSGGGGSGGGGSQTVVTQEPSLTVSPGGTVTLTCGSSTGAVTSGNYPNWVQQKPGQAPRGLIGGTKFLAPGTPARFSGSLLGGKAALTLSGVQPEDEAEYYCVLWYSNRWVFGGGTKLTVLGGGGSQRFCTGHFGGLHPCNGGGGGSGGGSRDWDFDVFGGGTPVGGHHHHHH

SEQ ID NO: 197 - protein, 571 aa, Artificial Sequence
  Synthetic polypeptide
QRFVTGHFGGLYPANGGGGGSQVQLQESGPGLVKPSQTLSLTCTVSGGSISSGGYYWSWIRQHPGKGLEWIGYIYYSGSTFYNPSLRSRVTISVDTSKNQFSLKLSSVTAADTAVYYCARDSSSSRALDYWGQGTLVTVSSGGGGSGGGGSGGGGSEIVLTQSPGTLSLSPGERATLSCRASQSVSSSYLAWYQQKPGQAPRLLIYGASSRATGIPDRFSGSGSGTDFTLTISRLEPEDFAVYYCQQYDSSPRTFGQGTKLEIKSGGGGSEVQLVESGGGLVQPGGSLKLSCAASGFTFNKYAMNWVRQAPGKGLEWVARIRSKYNNYATYYADSVKDRFTISRDDSKNTAYLQMNNLKTEDTAVYYCVRHGNFGNSYISYWAYWGQGTLVTVSSGGGGSGGGGSGGGGSQTVVTQEPSLTVSPGGTVTLTCGSSTGAVTSGNYPNWVQQKPGQAPRGLIGGTKFLAPGTPARFSGSLLGGKAALTLSGVQPEDEAEYYCVLWYSNRWVFGGGTKLTVLGGGGSQRFCTGHFGGLHPCNGGGGGSGGGSRDWDFDVFGGGTPVGGHHHHHH

SEQ ID NO: 198 - protein, 571 aa, Artificial Sequence
  Synthetic polypeptide
QRFVTGHFGGLYPANGGGGGSQVQLQESGPGLVKPSQTLSLTCTVSGGSISSGGYYWSWIRQHPGKGLEWIGYIYYRGRTYYNPSLKSRVTISVDTSKNQFSLKLSSVTAADTAVYYCARVYSNYGWFDPWGQGTLVTVSSGGGGSGGGGSGGGGSEIVLTQSPGTLSLSPGERATLSCRASQSVSSSYLAWYQQKPGQAPRLLIYGASSRATGIPDRFSGSGSGTDFTLTISRLEPEDFAVYYCQQYGSSPLTFGGGTKLEIKSGGGGSEVQLVESGGGLVQPGGSLKLSCAASGFTFNKYAMNWVRQAPGKGLEWVARIRSKYNNYATYYADSVKDRFTISRDDSKNTAYLQMNNLKTEDTAVYYCVRHGNFGNSYISYWAYWGQGTLVTVSSGGGGSGGGGSGGGGSQTVVTQEPSLTVSPGGTVTLTCGSSTGAVTSGNYPNWVQQKPGQAPRGLIGGTKFLAPGTPARFSGSLLGGKAALTLSGVQPEDEAEYYCVLWYSNRWVFGGGTKLTVLGGGGSQRFCTGHFGGLHPCNGGGGGSGGGSRDWDFDVFGGGTPVGGHHHHHH

SEQ ID NO: 199 - protein, 570 aa, Artificial Sequence
  Synthetic polypeptide
QRFVTGHFGGLYPANGGGGGSQVQLQESGPGLVKPSETLSLTCTVSGGSISSGGYYWSWIRQHPGKGLEWIGYIFYRGRTYYNPSLKSRVTISVDTSKNQFSLKLSSVTAADTAVYYCARVYSNYGWFDPWGQGTLVTVSSGGGGSGGGGSGGGGSEIVLTQSPGTLSLSPGERATLSCRASQSVSSSYLAWYQQKPGQAPRLLIYGASSRATGIPDRFSGSGSGTDFTLTISRLEPEDFAVYYCQQYGSSPTFGGGTKVEIKSGGGGSEVQLVESGGGLVQPGGSLKLSCAASGFTFNKYAMNWVRQAPGKGLEWVARIRSKYNNYATYYADSVKDRFTISRDDSKNTAYLQMNNLKTEDTAVYYCVRHGNFGNSYISYWAYWGQGTLVTVSSGGGGSGGGGSGGGGSQTVVTQEPSLTVSPGGTVTLTCGSSTGAVTSGNYPNWVQQKPGQAPRGLIGGTKFLAPGTPARFSGSLLGGKAALTLSGVQPEDEAEYYCVLWYSNRWVFGGGTKLTVLGGGGSQRFCTGHFGGLHPCNGGGGGSGGGSRDWDFDVFGGGTPVGGHHHHHH

SEQ ID NO: 200 - protein, 571 aa, Artificial Sequence
  Synthetic polypeptide
QRFVTGHFGGLYPANGGGGGSQVQLQESGPGLVKPSQTLSLTCTVSGGSISSGGYYWSWIRQHPGKGLEWIGYIFYRGRTYYNPSLKSRVTISVDTSKNQFSLKLSSVTAADTAVYYCARVYSNYGWFDPWGQGTLVTVSSGGGGSGGGGSGGGGSEIVLTQSPGTLSLSPGERATLSCRASQSVSSSYLAWYQQKPGQAPRLLIYGASSRATGIPDRFSGSGSGTDFTLTISRLEPEDFAVYYCQQYGSSPLTFGGGTKVEIKSGGGGSEVQLVESGGGLVQPGGSLKLSCAASGFTFNKYAMNWVRQAPGKGLEWVARIRSKYNNYATYYADSVKDRFTISRDDSKNTAYLQMNNLKTEDTAVYYCVRHGNFGNSYISYWAYWGQGTLVTVSSGGGGSGGGGSGGGGSQTVVTQEPSLTVSPGGTVTLTCGSSTGAVTSGNYPNWVQQKPGQAPRGLIGGTKFLAPGTPARFSGSLLGGKAALTLSGVQPEDEAEYYCVLWYSNRWVFGGGTKLTVLGGGGSQRFCTGHFGGLHPCNGGGGGSGGGSRDWDFDVFGGGTPVGGHHHHHH

SEQ ID NO: 201 - protein, 570 aa, Artificial Sequence
  Synthetic polypeptide
QRFVTGHFGGLYPANGGGGGSQVQLQESGPGLVKPSQTLSLTCTVSGGSISSGGYYWSWIRQHPGKGLEWIGYIYYRGRTYYNPSLKSRVTISVDTSKNQFSLKLSSVTAADTAVYYCARVYSNYGWFDPWGQGTLVTVSSGGGGSGGGGSGGGGSEIVLTQSPGTLSLSPGERATLSCRASQSVSSSYLAWYQQKPGQAPRLLIYGASSRATGIPDRFSGSGSGTDFTLTISRLEPEDFAVYYCQQYGSSPTFGPGTKVEIKSGGGGSEVQLVESGGGLVQPGGSLKLSCAASGFTFNKYAMNWVRQAPGKGLEWVARIRSKYNNYATYYADSVKDRFTISRDDSKNTAYLQMNNLKTEDTAVYYCVRHGNFGNSYISYWAYWGQGTLVTVSSGGGGSGGGGSGGGGSQTVVTQEPSLTVSPGGTVTLTCGSSTGAVTSGNYPNWVQQKPGQAPRGLIGGTKFLAPGTPARFSGSLLGGKAALTLSGVQPEDEAEYYCVLWYSNRWVFGGGTKLTVLGGGGSQRFCTGHFGGLHPCNGGGGGSGGGSRDWDFDVFGGGTPVGGHHHHHH

SEQ ID NO: 202 - protein, 570 aa, Artificial Sequence
  Synthetic polypeptide
QRFVTGHFGGLYPANGGGGGSQVQLQESGPGLVKPSQTLSLTCTVSGGSISSGGYYWSWIRQHPGKGLEWIGYIYYRGRTYYNPSLKSRVTISVDTSKNQFSLKLSSVTAADTAVYYCARVYSNYGWFDPWGQGTLVTVSSGGGGSGGGGSGGGGSEIVLTQSPGTLSLSPGERATLSCRASQSVSSSYLAWYQQKPGQAPRLLIYGASSRATGIPDRFSGSGSGTDFTLTISRLEPEDFAVYYCQQYGSSPTFGGGTKVEIKSGGGGSEVQLVESGGGLVQPGGSLKLSCAASGFTFNKYAMNWVRQAPGKGLEWVARIRSKYNNYATYYADSVKDRFTISRDDSKNTAYLQMNNLKTEDTAVYYCVRHGNFGNSYISYWAYWGQGTLVTVSSGGGGSGGGGSGGGGSQTVVTQEPSLTVSPGGTVTLTCGSSTGAVTSGNYPNWVQQKPGQAPRGLIGGTKFLAPGTPARFSGSLLGGKAALTLSGVQPEDEAEYYCVLWYSNRWVFGGGTKLTVLGGGGSQRFCTGHFGGLHPCNGGGGGSGGGSRDWDFDVFGGGTPVGGHHHHHH

SEQ ID NO: 203 - protein, 570 aa, Artificial Sequence
  Synthetic polypeptide
QRFVTGHFGGLYPANGGGGGSQVQLQESGPGLVKPSQTLSLTCTISGGSISSGGYYWSWIRQHPGKGLEWIGYIFYSGRTYYNPSLKSRVTISVDTSKNQFSLKLTSVTAADTAVYYCARVNSNYGWFDPWGQGTLVTVSSGGGGSGGGGSGGGGSEIVLTQSPGTLSLSPGERATLSCRASQSVSSSYLAWYQQKPGQAPRLLIYGASSRATGIPDRFSGSGSGTDFTLTISRLEPEDFAVYYCQQYGSSPTFGGGTKVEIKSGGGGSEVQLVESGGGLVQPGGSLKLSCAASGFTFNKYAMNWVRQAPGKGLEWVARIRSKYNNYATYYADSVKDRFTISRDDSKNTAYLQMNNLKTEDTAVYYCVRHGNFGNSYISYWAYWGQGTLVTVSSGGGGSGGGGSGGGGSQTVVTQEPSLTVSPGGTVTLTCGSSTGAVTSGNYPNWVQQKPGQAPRGLIGGTKFLAPGTPARFSGSLLGGKAALTLSGVQPEDEAEYYCVLWYSNRWVFGGGTKLTVLGGGGSQRFCTGHFGGLHPCNGGGGGSGGGSRDWDFDVFGGGTPVGGHHHHHH

SEQ ID NO: 204 - protein, 571 aa, Artificial Sequence
  Synthetic polypeptide
QRFVTGHFGGLYPANGGGGGSQVQLQESGPGLVKPSQTLSLTCTVSGGSISSGGYYWSWIRQHPGKGLDWIGYIFYRGRTYYNPSLKSRVTISVDTSKNQFSLKLSSVTAADTAVYYCARVNSNYGWFDPWGQGTLVTVSSGGGGSGGGGSGGGGSEIVLTQSPGTLSLSPGERATLSCRASQSVSSSYLAWYQQKPGQAPRLLIYGASSRATGIPDRFSGSGSGTDFTLTISRLEPEDFAVYYCQQYGSSPLTFGGGTKVEIKSGGGGSEVQLVESGGGLVQPGGSLKLSCAASGFTFNKYAMNWVRQAPGKGLEWVARIRSKYNNYATYYADSVKDRFTISRDDSKNTAYLQMNNLKTEDTAVYYCVRHGNFGNSYISYWAYWGQGTLVTVSSGGGGSGGGGSGGGGSQTVVTQEPSLTVSPGGTVTLTCGSSTGAVTSGNYPNWVQQKPGQAPRGLIGGTKFLAPGTPARFSGSLLGGKAALTLSGVQPEDEAEYYCVLWYSNRWVFGGGTKLTVLGGGGSQRFCTGHFGGLHPCNGGGGGSGGGSRDWDFDVFGGGTPVGGHHHHHH

SEQ ID NO: 205 - protein, 570 aa, Artificial Sequence
  Synthetic polypeptide
QRFVTGHFGGLYPANGGGGGSQVQLQESGPGLVKPSQTLSLTCTVSGGSISSGGYYWSWIRQHPGKGLEWIGYIYYRGRTYYNPSLKSRVTISVDTSKNQFSLKLSSVTAADTAVYYCARVYSNYGWFDPWGQGTLVTVSSGGGGSGGGGSGGGGSEIVLTQSPGTLSLSPGERATLSCRASQSVSSSYLAWYQQKPGQAPRLLIYGASTRATGIPDRFSGSGSGTDFTLTISRLEPEDFAVYYCQQYGSSPSFGQGTKVEIKSGGGGSEVQLVESGGGLVQPGGSLKLSCAASGFTFNKYAMNWVRQAPGKGLEWVARIRSKYNNYATYYADSVKDRFTISRDDSKNTAYLQMNNLKTEDTAVYYCVRHGNFGNSYISYWAYWGQGTLVTVSSGGGGSGGGGSGGGGSQTVVTQEPSLTVSPGGTVTLTCGSSTGAVTSGNYPNWVQQKPGQAPRGLIGGTKFLAPGTPARFSGSLLGGKAALTLSGVQPEDEAEYYCVLWYSNRWVFGGGTKLTVLGGGGSQRFCTGHFGGLHPCNGGGGGSGGGSRDWDFDVFGGGTPVGGHHHHHH

SEQ ID NO: 206 - protein, 571 aa, Artificial Sequence
  Synthetic polypeptide
QRFVTGHFGGLYPANGGGGGSQVQLQESGPGLVRPSQTLSLTCTVSGGSISSGGYYWSWIRQHPGKGLEWIGYIYYRGRTYYNPSLKSRVTISVDTSKNQFSLKLSSVTAADTAVYYCARVYSNYGWFDPWGQGTLVTVSSGGGGSGGGGSGGGGSEIVLTQSPGTLSLSPGERATLSCRASQSVSSSYLAWYQQKPGQAPRLLIYGASSRATGIPDRFSGSGSGTDFTLTISRLEPEDFAVYYCQQYDTSPLTFGGGTKVEIKSGGGGSEVQLVESGGGLVQPGGSLKLSCAASGFTFNKYAMNWVRQAPGKGLEWVARIRSKYNNYATYYADSVKDRFTISRDDSKNTAYLQMNNLKTEDTAVYYCVRHGNFGNSYISYWAYWGQGTLVTVSSGGGGSGGGGSGGGGSQTVVTQEPSLTVSPGGTVTLTCGSSTGAVTSGNYPNWVQQKPGQAPRGLIGGTKFLAPGTPARFSGSLLGGKAALTLSGVQPEDEAEYYCVLWYSNRWVFGGGTKLTVLGGGGSQRFCTGHFGGLHPCNGGGGGSGGGSRDWDFDVFGGGTPVGGHHHHHH

SEQ ID NO: 207 - protein, 570 aa, Artificial Sequence; identical to SEQ ID NO: 202
  Synthetic polypeptide

SEQ ID NO: 208 - protein, 571 aa, Artificial Sequence
  Synthetic polypeptide
QRFVTGHFGGLYPANGGGGGSQVQLQESGPGLVKPSQTLSLTCTVSGGSISSGGYYWSWIRQHPGKGLEWIGYIYYRGRTYYNPSLKSRVTISVDTSKNQFSLKLSSVTAADTAVYYCARVYSNYGWFDPWGQGTLVTVSSGGGGSGGGGSGGGGSEIVLTQSPGTLSLSPGERATLSCRASQSVSSSYLAWYQQKPGQAPRLLIYGASSRATGIPDRFSGSGSGTDFTLTISRLEPEDFAVYYCQQYGSSPLTFGGGTKVEIKSGGGGSEVQLVESGGGLVQPGGSLKLSCAASGFTFNKYAMNWVRQAPGKGLEWVARIRSKYNNYATYYADSVKDRFTISRDDSKNTAYLQMNNLKTEDTAVYYCVRHGNFGNSYISYWAYWGQGTLVTVSSGGGGSGGGGSGGGGSQTVVTQEPSLTVSPGGTVTLTCGSSTGAVTSGNYPNWVQQKPGQAPRGLIGGTKFLAPGTPARFSGSLLGGKAALTLSGVQPEDEAEYYCVLWYSNRWVFGGGTKLTVLGGGGSQRFCTGHFGGLHPCNGGGGGSGGGSRDWDFDVFGGGTPVGGHHHHHH

SEQ ID NO: 209 - protein, 571 aa, Artificial Sequence
  Synthetic polypeptide
QRFVTGHFGGLYPANGGGGGSQVQLQESGPGLVKPSQTLSLTCTVSGGSISSGGYYWSWVRQHPGKGLEWIGYIFYSGRTYYNPSLKSRVIISVDTSKNQFSLKLSSVTAADTAVYYCARVYSNYGWFDPWGQGTLVTVSSGGGGSGGGGSGGGGSEIVLTQSPGTLSLSPGERATLSCRASQSVSSSYLAWYQQKPGQAPRLLIYGASSRATGIPDRFSGSGSGTDFTLTISRLEPEDFAVYYCQQYGSSPLTFGGGTKVEIKSGGGGSEVQLVESGGGLVQPGGSLKLSCAASGFTFNKYAMNWVRQAPGKGLEWVARIRSKYNNYATYYADSVKDRFTISRDDSKNTAYLQMNNLKTEDTAVYYCVRHGNFGNSYISYWAYWGQGTLVTVSSGGGGSGGGGSGGGGSQTVVTQEPSLTVSPGGTVTLTCGSSTGAVTSGNYPNWVQQKPGQAPRGLIGGTKFLAPGTPARFSGSLLGGKAALTLSGVQPEDEAEYYCVLWYSNRWVFGGGTKLTVLGGGGSQRFCTGHFGGLHPCNGGGGGSGGGSRDWDFDVFGGGTPVGGHHHHHH

SEQ ID NO: 210 - protein, 571 aa, Artificial Sequence
  Synthetic polypeptide
QRFVTGHFGGLYPANGGGGGSQVQLQESGPGLVKPSQTLSLTCTVSGGSISSGGYYWSWIRQHPGKGLEWIGYIFYSGRTYYNPSLKSRVTISVDTSKNQFSLKLSSVTAADTAVYYCARVYSNYGWFDPWGQGTLVTVSSGGGGSGGGGSGGGGSEIVLTQSPGTLSLSPGERATLSCRASQSVSSSYLAWYQQKPGQAPRLLIYGASSRATGIPDRFSGSGSGTDFTLTISRLEPEDFAVYYCQQYGSSPLTFGGGTKVEIKSGGGGSEVQLVESGGGLVQPGGSLKLSCAASGFTFNKYAMNWVRQAPGKGLEWVARIRSKYNNYATYYADSVKDRFTISRDDSKNTAYLQMNNLKTEDTAVYYCVRHGNFGNSYISYWAYWGQGTLVTVSSGGGGSGGGGSGGGGSQTVVTQEPSLTVSPGGTVTLTCGSSTGAVTSGNYPNWVQQKPGQAPRGLIGGTKFLAPGTPARFSGSLLGGKAALTLSGVQPEDEAEYYCVLWYSNRWVFGGGTKLTVLGGGGSQRFCTGHFGGLHPCNGGGGGSGGGSRDWDFDVFGGGTPVGGHHHHHH

SEQ ID NO: 211 - protein, 571 aa, Artificial Sequence
  Synthetic polypeptide
QRFVTGHFGGLYPANGGGGGSQVQLQESGPGLVKPSQTLSLTCTVSGGSISSGGYYWSWIRQHPGKGLEWIGYIFYSGRTYYNPSLKSRVSISVDTSKNQFSLKLSSVTAADTAVYYCARVYSNYGWFDPWGQGTLVTVSSGGGGSGGGGSGGGGSEIVLTQSPGTLSLSPGERATLSCRASQSVSSSYLAWYQQKPGQAPRLLIYGASSRATGIPDRFSGSGSGTDFTLTISRLEPEDFAVYYCQQYGSSPLTFGGGTKVEIKSGGGGSEVQLVESGGGLVQPGGSLKLSCAASGFTFNKYAMNWVRQAPGKGLEWVARIRSKYNNYATYYADSVKDRFTISRDDSKNTAYLQMNNLKTEDTAVYYCVRHGNFGNSYISYWAYWGQGTLVTVSSGGGGSGGGGSGGGGSQTVVTQEPSLTVSPGGTVTLTCGSSTGAVTSGNYPNWVQQKPGQAPRGLIGGTKFLAPGTPARFSGSLLGGKAALTLSGVQPEDEAEYYCVLWYSNRWVFGGGTKLTVLGGGGSQRFCTGHFGGLHPCNGGGGGSGGGSRDWDFDVFGGGTPVGGHHHHHH

SEQ ID NO: 212 - protein, 571 aa, Artificial Sequence
  Synthetic polypeptide
QRFVTGHFGGLYPANGGGGGSQVQLQESGPGLVKPSETLSLTCTVSGGSVSSGGYYWSWIRQPPGKGLEWIGYIYYRGRTYYNPSLKSRVTISVDTSKNQFSLKLSSVTAADTAVYYCARVYSNYGWFDPWGQGTLVTVSSGGGGSGGGGSGGGGSEIVLTQSPGTLSLSPGERATLSCRASQSVSSSYLAWYQQKPGQAPRLLIYGASSRATGIPDRFSGSGSGTDFTLTISRLEPEDFAVYYCQQYGSSPLTFGGGTKVEIKSGGGGSEVQLVESGGGLVQPGGSLKLSCAASGFTFNKYAMNWVRQAPGKGLEWVARIRSKYNNYATYYADSVKDRFTISRDDSKNTAYLQMNNLKTEDTAVYYCVRHGNFGNSYISYWAYWGQGTLVTVSSGGGGSGGGGSGGGGSQTVVTQEPSLTVSPGGTVTLTCGSSTGAVTSGNYPNWVQQKPGQAPRGLIGGTKFLAPGTPARFSGSLLGGKAALTLSGVQPEDEAEYYCVLWYSNRWVFGGGTKLTVLGGGGSQRFCTGHFGGLHPCNGGGGGSGGGSRDWDFDVFGGGTPVGGHHHHHH

SEQ ID NO: 213 - protein, 570 aa, Artificial Sequence
  Synthetic polypeptide
QRFVTGHFGGLYPANGGGGGSQVQLQESGPGLVKPSQTLSLTCTVSGGSISSGGYYWSWIRQHPGKGLEWIGYIYYRGRTYYNPSLKSRVTISVDTSKNQFSLKLSSVTAADTAVYYCARVYSNYGWFDPWGQGTLVTVSSGGGGSGGGGSGGGGSEIVLTQSPGTLSLSPGERATLSCRASQSVSSSYLAWYQQKPGQAPRLLIYGASSRATGIPDRFSGSGSGTDFTLTISRLEPEDFAVYYCQQYGSSPTFGQGTRLEIKSGGGGSEVQLVESGGGLVQPGGSLKLSCAASGFTFNKYAMNWVRQAPGKGLEWVARIRSKYNNYATYYADSVKDRFTISRDDSKNTAYLQMNNLKTEDTAVYYCVRHGNFGNSYISYWAYWGQGTLVTVSSGGGGSGGGGSGGGGSQTVVTQEPSLTVSPGGTVTLTCGSSTGAVTSGNYPNWVQQKPGQAPRGLIGGTKFLAPGTPARFSGSLLGGKAALTLSGVQPEDEAEYYCVLWYSNRWVFGGGTKLTVLGGGGSQRFCTGHFGGLHPCNGGGGGSGGGSRDWDFDVFGGGTPVGGHHHHHH

SEQ ID NO: 214 - protein, 571 aa, Artificial Sequence
  Synthetic polypeptide
QRFVTGHFGGLYPANGGGGGSQVQLQESGPGLVKPSQTLSLTCTVSGGSISSGGYYWSWIRQHPGKGLEWIGYIFYSGKTYYNPSLKSRVSISVDTSKNQFSLKLSSVTAADTAVYYCARVYSNYGWFDPWGQGTLVTVSSGGGGSGGGGSGGGGSEIVLTQSPGTLSLSPGERATLSCRASQSVSSSYLAWYQQKPGQAPRLLIYGASSRATGIPDRFSGSGSGTDFTLTISRLEPEDFAVYYCQQYGSSPITFGQGTRLEIKSGGGGSEVQLVESGGGLVQPGGSLKLSCAASGFTFNKYAMNWVRQAPGKGLEWVARIRSKYNNYATYYADSVKDRFTISRDDSKNTAYLQMNNLKTEDTAVYYCVRHGNFGNSYISYWAYWGQGTLVTVSSGGGGSGGGGSGGGGSQTVVTQEPSLTVSPGGTVTLTCGSSTGAVTSGNYPNWVQQKPGQAPRGLIGGTKFLAPGTPARFSGSLLGGKAALTLSGVQPEDEAEYYCVLWYSNRWVFGGGTKLTVLGGGGSQRFCTGHFGGLHPCNGGGGGSGGGSRDWDFDVFGGGTPVGGHHHHHH

SEQ ID NO: 215 - protein, 576 aa, Artificial Sequence
  Synthetic polypeptide
QRFVTGHFGGLYPANGGGGGSQVQLQESGPGLVKPSETLSLTCTVSGGSISSYYWSWIRQPPGKGLEWIGYIYYSGSTNYNPSLKSRVTMSIDTSKNQFSLKLISVTAADTAVYYCARDQRRIVAAGGYYYGMDVWGQGTTVTVSSGGGGSGGGGSGGGGSEIVLTQSPGTLSLSPGERATLSCRASQSVSSSYLAWYQQKPGQAPRLLIYGASTRATGIPARFSGSGSGTDFTLTISRLEPEDFAVYYCQQYGSSPFTFGPGTKVDIKSGGGGSEVQLVESGGGLVQPGGSLKLSCAASGFTFNKYAMNWVRQAPGKGLEWVARIRSKYNNYATYYADSVKDRFTISRDDSKNTAYLQMNNLKTEDTAVYYCVRHGNFGNSYISYWAYWGQGTLVTVSSGGGGSGGGGSGGGGSQTVVTQEPSLTVSPGGTVTLTCGSSTGAVTSGNYPNWVQQKPGQAPRGLIGGTKFLAPGTPARFSGSLLGGKAALTLSGVQPEDEAEYYCVLWYSNRWVFGGGTKLTVLGGGGSQRFCTGHFGGLHPCNGGGGGSGGGSRDWDFDVFGGGTPVGGHHHHHH

SEQ ID NO: 216 - protein, 570 aa, Artificial Sequence
  Synthetic polypeptide
QRFVTGHFGGLYPANGGGGGSQVQLQESGPGLVKPSQTLSLTCTVSGGSISSNDYYWSWIRQHPGKGLEWIGYIYYSGSTFYNPSLKSRGAISVDTSKNQFSLKLTSVTAADTAVYYCARGVYRTGAFDIWGQGTMVTVSSGGGGSGGGGSGGGGSDIQMTQSPSSLSASVGDRVTITCRASQSISSYLNWYQQKPGKAPKSLIYAASSLQSGVPSKFSGSGSGTDFTLTISSLQPEDIATYYCQQSYSTPQAFGGGTKVDIKSGGGGSEVQLVESGGGLVQPGGSLKLSCAASGFTFNKYAMNWVRQAPGKGLEWVARIRSKYNNYATYYADSVKDRFTISRDDSKNTAYLQMNNLKTEDTAVYYCVRHGNFGNSYISYWAYWGQGTLVTVSSGGGGSGGGGSGGGGSQTVVTQEPSLTVSPGGTVTLTCGSSTGAVTSGNYPNWVQQKPGQAPRGLIGGTKFLAPGTPARFSGSLLGGKAALTLSGVQPEDEAEYYCVLWYSNRWVFGGGTKLTVLGGGGSQRFCTGHFGGLHPCNGGGGGSGGGSRDWDFDVFGGGTPVGGHHHHHH

SEQ ID NO: 217 - protein, 571 aa, Artificial Sequence
  Synthetic polypeptide
QRFVTGHFGGLYPANGGGGGSQVQLVQSGAEVKKPGASVKVSCKASGYTFTYYGISWVRQAPGQGLEWMGWINPYGGETNYAQKLQGRVTMTTDTSTSTAYMELRSLRSDDTAVYYCARGSGGFDYWGQGTLVTVSSGGGGSGGGGSGGGGSDIVMTQTPLSLSVTPGEPASISCRSSQSLLHSNGYNYLDWYLQKPGQSPQLLIYLGSYRASGVPDRFSGSGSGTDFTLKISRVEAEDVGVYYCMQALQTPFTFGPGTKVDIKSGGGGSEVQLVESGGGLVQPGGSLKLSCAASGFTFNKYAMNWVRQAPGKGLEWVARIRSKYNNYATYYADSVKDRFTISRDDSKNTAYLQMNNLKTEDTAVYYCVRHGNFGNSYISYWAYWGQGTLVTVSSGGGGSGGGGSGGGGSQTVVTQEPSLTVSPGGTVTLTCGSSTGAVTSGNYPNWVQQKPGQAPRGLIGGTKFLAPGTPARFSGSLLGGKAALTLSGVQPEDEAEYYCVLWYSNRWVFGGGTKLTVLGGGGSQRFCTGHFGGLHPCNGGGGGSGGGSRDWDFDVFGGGTPVGGHHHHHH

SEQ ID NO: 218 - protein, 571 aa, Artificial Sequence
  Synthetic polypeptide
QRFVTGHFGGLYPANGGGGGSQVQLVQSGAEVKKPGASVKVSCKASGYTFTYYGISWVRQAPGQGLEWMGWINPYSGATNYAQKLQGRVTMTTDTSTSTAYMELRSLRSDDTAVYYCARGSGGFDYWGQGTLVTVSSGGGGSGGGGSGGGGSDIVMTQTPLSLSVTPGEPASISCRSSQSLLHSNGYNYLDWYLQKPGQSPQLLIYLGSYRASGVPDRFSGSGSGTDFTLKISRVEAEDVGVYYCMQALQTPFTFGPGTKVDIKSGGGGSEVQLVESGGGLVQPGGSLKLSCAASGFTFNKYAMNWVRQAPGKGLEWVARIRSKYNNYATYYADSVKDRFTISRDDSKNTAYLQMNNLKTEDTAVYYCVRHGNFGNSYISYWAYWGQGTLVTVSSGGGGSGGGGSGGGGSQTVVTQEPSLTVSPGGTVTLTCGSSTGAVTSGNYPNWVQQKPGQAPRGLIGGTKFLAPGTPARFSGSLLGGKAALTLSGVQPEDEAEYYCVLWYSNRWVFGGGTKLTVLGGGGSQRFCTGHFGGLHPCNGGGGGSGGGSRDWDFDVFGGGTPVGGHHHHHH

SEQ ID NO: 219 - protein, 571 aa, Artificial Sequence
  Synthetic polypeptide
QRFVTGHFGGLYPANGGGGGSQVQLVQSGAEVKKPGASVKVSCKASGYTFTYYGISWVRQAPGQGLEWMGWINPYTGKTNYAQKLQGRVTMTTDTSTSTAYMELRSLRSDDTAVYYCARGSGGFDYWGQGTLVTVSSGGGGSGGGGSGGGGSDIVMTQTPLSLSVTPGEPASISCRSSQSLLHSNGYNYLDWYLQKPGQSPQLLIYLGSYRASGVPDRFSGSGSGTDFTLKISRVEAEDVGVYYCMQALQTPFTFGPGTKVDIKSGGGGSEVQLVESGGGLVQPGGSLKLSCAASGFTFNKYAMNWVRQAPGKGLEWVARIRSKYNNYATYYADSVKDRFTISRDDSKNTAYLQMNNLKTEDTAVYYCVRHGNFGNSYISYWAYWGQGTLVTVSSGGGGSGGGGSGGGGSQTVVTQEPSLTVSPGGTVTLTCGSSTGAVTSGNYPNWVQQKPGQAPRGLIGGTKFLAPGTPARFSGSLLGGKAALTLSGVQPEDEAEYYCVLWYSNRWVFGGGTKLTVLGGGGSQRFCTGHFGGLHPCNGGGGGSGGGSRDWDFDVFGGGTPVGGHHHHHH

SEQ ID NO: 220 - protein, 571 aa, Artificial Sequence
  Synthetic polypeptide
QRFVTGHFGGLYPANGGGGGSQVQLVQSGAEVKKPGASVKVSCKASGYTFTYYGISWVRQAPGQGLEWMGWINPYTGKTNYAQKLQGRVTMTTDTSTSTAYMELRSLRSDDTAVYYCARGSGGFDYWGQGTLVTVSSGGGGSGGGGSGGGGSDIVMTQTPLSLSVTPGEPASISCRSSQSLLHSVGYNYLDWYLQKPGQSPQLLIYLGSYRASGVPDRFSGSGSGTDFTLKISRVEAEDVGVYYCMQALQTPFTFGPGTKVDIKSGGGGSEVQLVESGGGLVQPGGSLKLSCAASGFTFNKYAMNWVRQAPGKGLEWVARIRSKYNNYATYYADSVKDRFTISRDDSKNTAYLQMNNLKTEDTAVYYCVRHGNFGNSYISYWAYWGQGTLVTVSSGGGGSGGGGSGGGGSQTVVTQEPSLTVSPGGTVTLTCGSSTGAVTSGNYPNWVQQKPGQAPRGLIGGTKFLAPGTPARFSGSLLGGKAALTLSGVQPEDEAEYYCVLWYSNRWVFGGGTKLTVLGGGGSQRFCTGHFGGLHPCNGGGGGSGGGSRDWDFDVFGGGTPVGGHHHHHH

SEQ ID NO: 221 - protein, 571 aa, Artificial Sequence
  Synthetic polypeptide
QRFVTGHFGGLYPANGGGGGSQVQLVQSGAEVKKPGASVKVSCKASGYTFTSYGISWVRQAPGQGLEWMGWINPYTGNRNYAQKVQDRVTMTTDTSTNTAYMELSSLRSDDTAVYYCARGSGGFDYWGQGTLVTVSSGGGGSGGGGSGGGGSDIVMTQSPLSLPVTLGQPASISCRSSQSLLHSVGYNYLDWYLQKPGQSPQLLIYLGSNRASGVPDRFSGSGSGTDFTLKISRVEAEDVGVYYCMQALQTPFTFGPGTKLEIKSGGGGSEVQLVESGGGLVQPGGSLKLSCAASGFTFNKYAMNWVRQAPGKGLEWVARIRSKYNNYATYYADSVKDRFTISRDDSKNTAYLQMNNLKTEDTAVYYCVRHGNFGNSYISYWAYWGQGTLVTVSSGGGGSGGGGSGGGGSQTVVTQEPSLTVSPGGTVTLTCGSSTGAVTSGNYPNWVQQKPGQAPRGLIGGTKFLAPGTPARFSGSLLGGKAALTLSGVQPEDEAEYYCVLWYSNRWVFGGGTKLTVLGGGGSQRFCTGHFGGLHPCNGGGGGSGGGSRDWDFDVFGGGTPVGGHHHHHH

SEQ ID NO: 222 - protein, 571 aa, Artificial Sequence
  Synthetic polypeptide
QRFVTGHFGGLYPANGGGGGSQVQLVQSGAEVKKPGASVKVSCKASGYTFTYYGISWVRQAPGQGLEWMGWINPYTGKTNYAQKLQDRVTMTTDTSTNTAYMELRSLRSDDTAVYYCARGSGGFDYWGQGTLVTVSSGGGGSGGGGSGGGGSDIVMTQTPLSLPVTPGEPASISCRSSQSLLHSVGYNYLDWYLQKPGQSPQLLIYLGSNRASGVPDRFSGSGSGTDFTLKISRVEAEDVGVYYCMQALQTPFTFGPGTKVDIKSGGGGSEVQLVESGGGLVQPGGSLKLSCAASGFTFNKYAMNWVRQAPGKGLEWVARIRSKYNNYATYYADSVKDRFTISRDDSKNTAYLQMNNLKTEDTAVYYCVRHGNFGNSYISYWAYWGQGTLVTVSSGGGGSGGGGSGGGGSQTVVTQEPSLTVSPGGTVTLTCGSSTGAVTSGNYPNWVQQKPGQAPRGLIGGTKFLAPGTPARFSGSLLGGKAALTLSGVQPEDEAEYYCVLWYSNRWVFGGGTKLTVLGGGGSQRFCTGHFGGLHPCNGGGGGSGGGSRDWDFDVFGGGTPVGGHHHHHH

SEQ ID NO: 223 - protein, 571 aa, Artificial Sequence
  Synthetic polypeptide
QRFVTGHFGGLYPANGGGGGSQVQLVQSGAEVKKPGASVKVSCKASGYTFTTYGISWVRQAPGQGLEWMGWINPYTGKTNYAQKLQGRVTMATDTSTSTAYMELRSLRSDDTAVYYCARGSGGFDYWGQGTLVTVSSGGGGSGGGGSGGGGSDIVMTQSPLSLPVTPGEPASISCRSSQSLLHSVGYNYLDWYLQKPGQSPQLLIYLGSNRASGVPDRFSGSGSGTDFTLKISRVEAEDVGVYYCMQALQTPFTFGPGTKLEIKSGGGGSEVQLVESGGGLVQPGGSLKLSCAASGFTFNKYAMNWVRQAPGKGLEWVARIRSKYNNYATYYADSVKDRFTISRDDSKNTAYLQMNNLKTEDTAVYYCVRHGNFGNSYISYWAYWGQGTLVTVSSGGGGSGGGGSGGGGSQTVVTQEPSLTVSPGGTVTLTCGSSTGAVTSGNYPNWVQQKPGQAPRGLIGGTKFLAPGTPARFSGSLLGGKAALTLSGVQPEDEAEYYCVLWYSNRWVFGGGTKLTVLGGGGSQRFCTGHFGGLHPCNGGGGGSGGGSRDWDFDVFGGGTPVGGHHHHHH

SEQ ID NO: 224 - protein, 571 aa, Artificial Sequence
  Synthetic polypeptide
QRFVTGHFGGLYPANGGGGGSQVQLVQSGAEVKEPGASVKVSCKASGYTFTYYGISWVRQAPGQGLEWMGWINPYTGNRNYAQKVQDRVTMTTDTSTNTAYMELRSLRSDDTAVYYCARGSGGFDYWGQGTLVTVSSGGGGSGGGGSGGGGSDIVMTQSPLSLPVTPGEPASISCRSSQSLLHSVGYNYLDWYLQKPGQSPQLLIYLGSNRASGVPDRFSGSGSGTDFTLKISRVEAEDVGVYYCMQALQTPFTFGPGTKLEIKSGGGGSEVQLVESGGGLVQPGGSLKLSCAASGFTFNKYAMNWVRQAPGKGLEWVARIRSKYNNYATYYADSVKDRFTISRDDSKNTAYLQMNNLKTEDTAVYYCVRHGNFGNSYISYWAYWGQGTLVTVSSGGGGSGGGGSGGGGSQTVVTQEPSLTVSPGGTVTLTCGSSTGAVTSGNYPNWVQQKPGQAPRGLIGGTKFLAPGTPARFSGSLLGGKAALTLSGVQPEDEAEYYCVLWYSNRWVFGGGTKLTVLGGGGSQRFCTGHFGGLHPCNGGGGGSGGGSRDWDFDVFGGGTPVGGHHHHHH

SEQ ID NO: 225 - protein, 571 aa, Artificial Sequence
  Synthetic polypeptide
QRFVTGHFGGLYPANGGGGGSQVQLVQSGAEVKKPGASVKVSCKASGYTFTYYGISWVRQAPGQGLEWMGWINPYTGKTNYAQKLQGRVTMTTDTSTSTAYMELRSLRSDDTAVYYCARGSGGFDYWGQGTLVTVSSGGGGSGGGGSGGGGSDIVMTQSPLSLPVTPGEPASISCRSSQSLLHSVGYNYLDWYLQKPGQSPQLLIYLGSNRASGVPDRFSGSGSGTDFTLKISRVEAEDVGVYYCMQALQTPFTFGPGTKVEIKSGGGGSEVQLVESGGGLVQPGGSLKLSCAASGFTFNKYAMNWVRQAPGKGLEWVARIRSKYNNYATYYADSVKDRFTISRDDSKNTAYLQMNNLKTEDTAVYYCVRHGNFGNSYISYWAYWGQGTLVTVSSGGGGSGGGGSGGGGSQTVVTQEPSLTVSPGGTVTLTCGSSTGAVTSGNYPNWVQQKPGQAPRGLIGGTKFLAPGTPARFSGSLLGGKAALTLSGVQPEDEAEYYCVLWYSNRWVFGGGTKLTVLGGGGSQRFCTGHFGGLHPCNGGGGGSGGGSRDWDFDVFGGGTPVGGHHHHHH

SEQ ID NO: 226 - protein, 571 aa, Artificial Sequence
  Synthetic polypeptide
QRFVTGHFGGLYPANGGGGGSQVQLVQSGAEVKKPGASVKVSCKASGYTFTSYGITWVRQAPGQGLEWMGWINPYTGNRNYAQKVQGRVTMTTDTSTSTAYMELRSLRSDDTAVYYCARGSGGFDYWGQGTLVTVSSGGGGSGGGGSGGGGSDIVMTQSPLSLSVTPGEPASISCRSSQSLLHSVGYNYLDWYLQKPGQSPQLLIYLGSNRASGVPDRFSGSGSGTDFTLKISRVEAEDVGVYYCMQALQTPFTFGPGTKVDIKSGGGGSEVQLVESGGGLVQPGGSLKLSCAASGFTFNKYAMNWVRQAPGKGLEWVARIRSKYNNYATYYADSVKDRFTISRDDSKNTAYLQMNNLKTEDTAVYYCVRHGNFGNSYISYWAYWGQGTLVTVSSGGGGSGGGGSGGGGSQTVVTQEPSLTVSPGGTVTLTCGSSTGAVTSGNYPNWVQQKPGQAPRGLIGGTKFLAPGTPARFSGSLLGGKAALTLSGVQPEDEAEYYCVLWYSNRWVFGGGTKLTVLGGGGSQRFCTGHFGGLHPCNGGGGGSGGGSRDWDFDVFGGGTPVGGHHHHHH

SEQ ID NO: 227 - protein, 571 aa, Artificial Sequence
  Synthetic polypeptide
QRFVTGHFGGLYPANGGGGGSQVQLVQSGAEVKKPGASVKVSCKASGYTFTSYGISWVRQAPGQGLEWMGWINPYTGNRNYAQKFQGRVTMTTDTSTNTAYMELSSLRSEDTAVYYCARGSGGFDYWGQGTLVTVSSGGGGSGGGGSGGGGSDIVMTQSPLSLPVTPGEPASISCRSSQSLLHSVGYNYLDWYLQKPGQSPQLLIYLGSNRASGVPDRFSGSGSGTDFTLKISRVEAEDVGVYYCMQALQTPFTFGPGTKVDIKSGGGGSEVQLVESGGGLVQPGGSLKLSCAASGFTFNKYAMNWVRQAPGKGLEWVARIRSKYNNYATYYADSVKDRFTISRDDSKNTAYLQMNNLKTEDTAVYYCVRHGNFGNSYISYWAYWGQGTLVTVSSGGGGSGGGGSGGGGSQTVVTQEPSLTVSPGGTVTLTCGSSTGAVTSGNYPNWVQQKPGQAPRGLIGGTKFLAPGTPARFSGSLLGGKAALTLSGVQPEDEAEYYCVLWYSNRWVFGGGTKLTVLGGGGSQRFCTGHFGGLHPCNGGGGGSGGGSRDWDFDVFGGGTPVGGHHHHHH

SEQ ID NO: 228 - protein, 571 aa, Artificial Sequence
  Synthetic polypeptide
QRFVTGHFGGLYPANGGGGGSQVQLVQSGAEVKKPGASVKVSCKASGYSFTSYGISWVRQAPGQGLEWMGWINPYTGNRNYAQKVQGRVTMTTDTSTSTAYMELRSLRSDDTAVYYCARGSGGFDYWGQGTLVTVSSGGGGSGGGGSGGGGSDIVMTQSPLSLPVTPGEPASISCRSSQSLLHSVGYNYLDWYLQKPGQSPQLLIYLGSNRASGVPDRFSGSGSGTDFTLKISRVEAEDVGVYYCMQALQTPFTFGPGTKVEIKSGGGGSEVQLVESGGGLVQPGGSLKLSCAASGFTFNKYAMNWVRQAPGKGLEWVARIRSKYNNYATYYADSVKDRFTISRDDSKNTAYLQMNNLKTEDTAVYYCVRHGNFGNSYISYWAYWGQGTLVTVSSGGGGSGGGGSGGGGSQTVVTQEPSLTVSPGGTVTLTCGSSTGAVTSGNYPNWVQQKPGQAPRGLIGGTKFLAPGTPARFSGSLLGGKAALTLSGVQPEDEAEYYCVLWYSNRWVFGGGTKLTVLGGGGSQRFCTGHFGGLHPCNGGGGGSGGGSRDWDFDVFGGGTPVGGHHHHHH

SEQ ID NO: 229 - protein, 571 aa, Artificial Sequence
  Synthetic polypeptide
QRFVTGHFGGLYPANGGGGGSQVQLVQSGAEVKKPGASVKVSCKASGYTFTYYGISWVRQAPGQGLEWMGWINPYTGKTNYAQKVQGRVTMTTDTSTSTAYMELRNLRSDDTAVYYCARGSGGFDYWGQGTLVTVSSGGGGSGGGGSGGGGSDIVMTQTPLSLSVTPGQPASISCRSSQSLLHSVGYNYLDWYLQKPGQSPQLLIYLGSNRASGVPDRFSGSGSGTDFTLKISRVEAEDVGVYYCMQALQTPFTFGPGTKVDIKSGGGGSEVQLVESGGGLVQPGGSLKLSCAASGFTFNKYAMNWVRQAPGKGLEWVARIRSKYNNYATYYADSVKDRFTISRDDSKNTAYLQMNNLKTEDTAVYYCVRHGNFGNSYISYWAYWGQGTLVTVSSGGGGSGGGGSGGGGSQTVVTQEPSLTVSPGGTVTLTCGSSTGAVTSGNYPNWVQQKPGQAPRGLIGGTKFLAPGTPARFSGSLLGGKAALTLSGVQPEDEAEYYCVLWYSNRWVFGGGTKLTVLGGGGSQRFCTGHFGGLHPCNGGGGGSGGGSRDWDFDVFGGGTPVGGHHHHHH

SEQ ID NO: 230 - protein, 571 aa, Artificial Sequence
  Synthetic polypeptide
QRFVTGHFGGLYPANGGGGGSQVQLVQSGAEVKKPGASVKVSCKASGYTFTYYGISWVRQAPGQGLEWMGWINPYTGKTNYAQKLQGRVTMTTDTSTSTAYMELRSLRSDDTAVYYCARGSGGFDYWGQGTLVTVSSGGGGSGGGGSGGGGSDIVMTQTPLSLSVTPGQPASISCRSSQSLLHSVGYNYLDWYLQKPGQSPQLLIYLGSNRASGVPDRFSGSGSGTDFTLKISRVEAEDVGVYYCMQALQTPFTFGPGTKVDIKSGGGGSEVQLVESGGGLVQPGGSLKLSCAASGFTFNKYAMNWVRQAPGKGLEWVARIRSKYNNYATYYADSVKDRFTISRDDSKNTAYLQMNNLKTEDTAVYYCVRHGNFGNSYISYWAYWGQGTLVTVSSGGGGSGGGGSGGGGSQTVVTQEPSLTVSPGGTVTLTCGSSTGAVTSGNYPNWVQQKPGQAPRGLIGGTKFLAPGTPARFSGSLLGGKAALTLSGVQPEDEAEYYCVLWYSNRWVFGGGTKLTVLGGGGSQRFCTGHFGGLHPCNGGGGGSGGGSRDWDFDVFGGGTPVGGHHHHHH

SEQ ID NO: 231 - protein, 575 aa, Artificial Sequence
  Synthetic polypeptide
QRFVTGHFGGLYPANGGGGGSQVQLVESGGGVVQPGRSLRLSCAASGFTFRNYAMHWVRQAPGKGLEWVAVISYSGNNKYYASSVKGRFTISRDNSKNTLYLQLNSLRAEDTAVYYCAREFYYDSTGYDYSTPGDYWGQGTLVTVSSGGGGSGGGGSGGGGSDIQMTQSPSSLSASVGDRVTITCQASQDISNYLNWYQQKPGKAPKLLIYDASNLETGVPSRFSGSGSGTDFTFTISSLQPEDIATYYCQQYDNLPTFGQGTRLEIKSGGGGSEVQLVESGGGLVQPGGSLKLSCAASGFTFNKYAMNWVRQAPGKGLEWVARIRSKYNNYATYYADSVKDRFTISRDDSKNTAYLQMNNLKTEDTAVYYCVRHGNFGNSYISYWAYWGQGTLVTVSSGGGGSGGGGSGGGGSQTVVTQEPSLTVSPGGTVTLTCGSSTGAVTSGNYPNWVQQKPGQAPRGLIGGTKFLAPGTPARFSGSLLGGKAALTLSGVQPEDEAEYYCVLWYSNRWVFGGGTKLTVLGGGGSQRFCTGHFGGLHPCNGGGGGSGGGSRDWDFDVFGGGTPVGGHHHHHH

SEQ ID NO: 232 - protein, 576 aa, Artificial Sequence
  Synthetic polypeptide
QRFVTGHFGGLYPANGGGGGSQVQLVESGGGVVQPGRSLRLSCVASGFTFRNYAMHWVRQAPGKGLEWVAVISYSGNNKYYASSVKGRFTISRDNSKNTLYLQLNSLRAEDTAVYYCAREFYYDSTGYDYSTPGDYWGQGTLVTVSSGGGGSGGGGSGGGGSDIQMTQSPSSLSASVGDRVTITCRASQSISSYLNWYQQKPGKAPKLLIYDASSLQSGVPSRFSGSGSGTEFTLTISSLQAEDVAVYYCQQYYSTPLTFGGGTKVDIKSGGGGSEVQLVESGGGLVQPGGSLKLSCAASGFTFNKYAMNWVRQAPGKGLEWVARIRSKYNNYATYYADSVKDRFTISRDDSKNTAYLQMNNLKTEDTAVYYCVRHGNFGNSYISYWAYWGQGTLVTVSSGGGGSGGGGSGGGGSQTVVTQEPSLTVSPGGTVTLTCGSSTGAVTSGNYPNWVQQKPGQAPRGLIGGTKFLAPGTPARFSGSLLGGKAALTLSGVQPEDEAEYYCVLWYSNRWVFGGGTKLTVLGGGGSQRFCTGHFGGLHPCNGGGGGSGGGSRDWDFDVFGGGTPVGGHHHHHH

SEQ ID NO: 233 - protein, 576 aa, Artificial Sequence
  Synthetic polypeptide
QRFVTGHFGGLYPANGGGGGSQVQLVESGGGVVQPGRSLRLSCAASGFTFRNYAMHWVRQAPGKGLEWVAGISYSGTNKYYASSVKGRFTISRDNSKNTLYLQLNSLRAEDTAVYYCAREFYYDSTGYDYSTPGDYWGQGTLVTVSSGGGGSGGGGSGGGGSDIQMTQSPSSLSASVGDRVTITCQASQDISNYLNWYQQKPGKAPKLLIYDASNLETGVPSRFSGSGSGTEFTLTISSLQPEDIATYYCQQYDNLPLTFGGGTKVDIKSGGGGSEVQLVESGGGLVQPGGSLKLSCAASGFTFNKYAMNWVRQAPGKGLEWVARIRSKYNNYATYYADSVKDRFTISRDDSKNTAYLQMNNLKTEDTAVYYCVRHGNFGNSYISYWAYWGQGTLVTVSSGGGGSGGGGSGGGGSQTVVTQEPSLTVSPGGTVTLTCGSSTGAVTSGNYPNWVQQKPGQAPRGLIGGTKFLAPGTPARFSGSLLGGKAALTLSGVQPEDEAEYYCVLWYSNRWVFGGGTKLTVLGGGGSQRFCTGHFGGLHPCNGGGGGSGGGSRDWDFDVFGGGTPVGGHHHHHH

SEQ ID NO: 234 - protein, 576 aa, Artificial Sequence
  Synthetic polypeptide
QRFVTGHFGGLYPANGGGGGSQVQLVESGGGVVQPGRSLRLSCVASGFTFRNYAMHWVRQAPGKGLEWVAVISYSGNNKYYASSVKGRFTISRDNSKNTLFLQLNSLRAEDTAVYYCAREFYYDSTGYDYSTPGNYWGQGTLVTVSSGGGGSGGGGSGGGGSDIQMTQSPSSLSASVGDRVTITCQASQDISNYLNWYQQKPGKAPKLLIYDASNLETGVPSRFSGSGSGTDFTFTISSLQPEDIATYYCQQYVNLPLTFGGGTKLEIKSGGGGSEVQLVESGGGLVQPGGSLKLSCAASGFTFNKYAMNWVRQAPGKGLEWVARIRSKYNNYATYYADSVKDRFTISRDDSKNTAYLQMNNLKTEDTAVYYCVRHGNFGNSYISYWAYWGQGTLVTVSSGGGGSGGGGSGGGGSQTVVTQEPSLTVSPGGTVTLTCGSSTGAVTSGNYPNWVQQKPGQAPRGLIGGTKFLAPGTPARFSGSLLGGKAALTLSGVQPEDEAEYYCVLWYSNRWVFGGGTKLTVLGGGGSQRFCTGHFGGLHPCNGGGGGSGGGSRDWDFDVFGGGTPVGGHHHHHH

SEQ ID NO: 235 - protein, 573 aa, Artificial Sequence
  Synthetic polypeptide
QRFVTGHFGGLYPANGGGGGSQVQLVESGGGVVQPGRSLRLSCAASGFTFSSYGMQWVRQAPGKGLEWVAVIWYSGSNKYYASSVKGRFTISRDNSKNTLYLQMNSLRAEDTAVYYCARDGYPIFYRYYGMDVWGQGTTVTVSSGGGGSGGGGSGGGGSDIQMTQSPSSLSASVGDRVTITCRASQGISNYLAWYQQKPGKVPKLLIYAASTLQSGVPSRFSGSGSGTDFTLTISSLQPEDVATYYCQKYNSAPLTFGGGTKVEIKSGGGGSEVQLVESGGGLVQPGGSLKLSCAASGFTFNKYAMNWVRQAPGKGLEWVARIRSKYNNYATYYADSVKDRFTISRDDSKNTAYLQMNNLKTEDTAVYYCVRHGNFGNSYISYWAYWGQGTLVTVSSGGGGSGGGGSGGGGSQTVVTQEPSLTVSPGGTVTLTCGSSTGAVTSGNYPNWVQQKPGQAPRGLIGGTKFLAPGTPARFSGSLLGGKAALTLSGVQPEDEAEYYCVLWYSNRWVFGGGTKLTVLGGGGSQRFCTGHFGGLHPCNGGGGGSGGGSRDWDFDVFGGGTPVGGHHHHHH

SEQ ID NO: 236 - protein, 574 aa, Artificial Sequence
  Synthetic polypeptide
QRFVTGHFGGLYPANGGGGGSQVQLVESGGGVVQPGRSLRLSCAASGFTFSSYGMHWVRQAPGKGLEWVAVISYSGSNKYYASSVKGRFTISRDNSKNTLYLQMNSLRAEDTAVYYCARDGYPIFYRYYGMDVWGQGTTVTVSSGGGGSGGGGSGGGGSEIVLTQSPGTLSLSPGERATLSCRASQSVSSSYLAWYQQKPGQAPRLLIYGASSRATGIPDRFSGSGSGTDFTLTISRLEPEDLAVYYCQQYGTSPLTFGGGTKLEIKSGGGGSEVQLVESGGGLVQPGGSLKLSCAASGFTFNKYAMNWVRQAPGKGLEWVARIRSKYNNYATYYADSVKDRFTISRDDSKNTAYLQMNNLKTEDTAVYYCVRHGNFGNSYISYWAYWGQGTLVTVSSGGGGSGGGGSGGGGSQTVVTQEPSLTVSPGGTVTLTCGSSTGAVTSGNYPNWVQQKPGQAPRGLIGGTKFLAPGTPARFSGSLLGGKAALTLSGVQPEDEAEYYCVLWYSNRWVFGGGTKLTVLGGGGSQRFCTGHFGGLHPCNGGGGGSGGGSRDWDFDVFGGGTPVGGHHHHHH

SEQ ID NO: 237 - protein, 574 aa, Artificial Sequence
  Synthetic polypeptide
QRFVTGHFGGLYPANGGGGGSQVQLVESGGGVVQPGRSLRLSCAASGFTFSSFGMHWVRQAPGKGLEWVAFIWYSGSNKYYASSVKGRVTISRDNSKNTLYLQMNSLRAEDTAVYYCARDGYPIFYYYYGMDVWGQGTTVTVSSGGGGSGGGGSGGGGSEIVLTQSPGTLSLSPGERATLSCRASQSVSSSYLAWYQQKPGQAPRLLIYGASSRATGIPDRFSGSGSGTDFTLTISRLEPEDFAVYYCQQYGSSPFTFGPGTRLEIKSGGGGSEVQLVESGGGLVQPGGSLKLSCAASGFTFNKYAMNWVRQAPGKGLEWVARIRSKYNNYATYYADSVKDRFTISRDDSKNTAYLQMNNLKTEDTAVYYCVRHGNFGNSYISYWAYWGQGTLVTVSSGGGGSGGGGSGGGGSQTVVTQEPSLTVSPGGTVTLTCGSSTGAVTSGNYPNWVQQKPGQAPRGLIGGTKFLAPGTPARFSGSLLGGKAALTLSGVQPEDEAEYYCVLWYSNRWVFGGGTKLTVLGGGGSQRFCTGHFGGLHPCNGGGGGSGGGSRDWDFDVFGGGTPVGGHHHHHH

SEQ ID NO: 238 - protein, 549 aa, Artificial Sequence
  Synthetic polypeptide
QRFVTGHFGGLHPANGGGGGSQVQLVESGGGVVQPGGSLRLSCAASGFTFSSYGMHWVRQAPGKGLEWVAFIWYDGSNKYYADSVKGRFTISRDNSKNTLYLQMNSLRAEDTAVYYCARRAGIIGTIGYYYGMDVWGQGTTVTVSSGGGGSGGGGSGGGGSSYELTQPPSVSVSPGQTASITCSGDRLGEKYTSWYQQRPGQSPLLVIYQDTKRPSGIPERFSGSNSGNTATLTISGTQAMDEADYYCQAWESSTVVFGGGTKLTVLSGGGGSEVQLVESGGGLVQPGGSLKLSCAASGFTFNKYAMNWVRQAPGKGLEWVARIRSKYNNYATYYADSVKDRFTISRDDSKNTAYLQMNNLKTEDTAVYYCVRHGNFGNSYISYWAYWGQGTLVTVSSGGGGSGGGGSGGGGSQTVVTQEPSLTVSPGGTVTLTCGSSTGAVTSGNYPNWVQQKPGQAPRGLIGGTKFLAPGTPARFSGSLLGGKAALTLSGVQPEDEAEYYCVLWYSNRWVFGGGTKLTVLGGGGSQRFCTGHFGGLHPCNGHHHHHH

SEQ ID NO: 239 - protein, 546 aa, Artificial Sequence
  Synthetic polypeptide
QRFVTGHFGGLHPANGGGGGSQVQLQESGPGLVKPSQTLSLTCTVSGGSISRGGYYWSWIRQHPGKGLEWIGYIFYRGRTYYNPSLKSRVTISVDTSKNQFSLKLSSVTAADTAVYYCARVNSNYGWFDPWGQGTLVTVSSGGGGSGGGGSGGGGSEIVLTQFPGTLSLSPGERATLSCRASQSVSSSYLAWYQQKPGQAPRLLIYGASSRATGIPDRFSGSGSGTDFTLTISRLEPEDFAVYYCQQYGSSPLTFGGGTKLEIKSGGGGSEVQLVESGGGLVQPGGSLKLSCAASGFTFNKYAMNWVRQAPGKGLEWVARIRSKYNNYATYYADSVKDRFTISRDDSKNTAYLQMNNLKTEDTAVYYCVRHGNFGNSYISYWAYWGQGTLVTVSSGGGGSGGGGSGGGGSQTVVTQEPSLTVSPGGTVTLTCGSSTGAVTSGNYPNWVQQKPGQAPRGLIGGTKFLAPGTPARFSGSLLGGKAALTLSGVQPEDEAEYYCVLWYSNRWVFGGGTKLTVLGGGGSQRFCTGHFGGLHPCNGHHHHHH

SEQ ID NO: 240 - protein, 546 aa, Artificial Sequence
  Synthetic polypeptide
QRFVTGHFGGLHPANGGGGGSQVQLQESGPGLVKPSQTLSLTCTVSGGSISSGGYYWSWIRQHPGKGLEWIGYIFYRGRTYYNPSLKSRVTISVDTSKNQFSLKLSSVTAADTAVYYCARVYSNYGWFDPWGQGTLVTVSSGGGGSGGGGSGGGGSEIVLTQSPGTLSLSPGERATLSCRASQSVSSSYLAWYQQKPGQAPRLLIYGTSNRATGIPDRFSGSGSGTDFTLTISRLEPEDFAVYYCQQYGSSPLTFGGGTKLEIKSGGGGSEVQLVESGGGLVQPGGSLKLSCAASGFTFNKYAMNWVRQAPGKGLEWVARIRSKYNNYATYYADSVKDRFTISRDDSKNTAYLQMNNLKTEDTAVYYCVRHGNFGNSYISYWAYWGQGTLVTVSSGGGGSGGGGSGGGGSQTVVTQEPSLTVSPGGTVTLTCGSSTGAVTSGNYPNWVQQKPGQAPRGLIGGTKFLAPGTPARFSGSLLGGKAALTLSGVQPEDEAEYYCVLWYSNRWVFGGGTKLTVLGGGGSQRFCTGHFGGLHPCNGHHHHHH

SEQ ID NO: 241 - protein, 546 aa, Artificial Sequence
  Synthetic polypeptide
QRFVTGHFGGLHPANGGGGGSQVQLQESGPGLVKPSQTLSLTCTVSGGSISSGGYYWSWIRQHPGKGLEWIGYIFYSGRTYYNPSLKSRVTISVDTSKNQFSLKLSSVTAADTAVYYCARVYSNYGWFDPWGQGTLVTVSSGGGGSGGGGSGGGGSEIVLTQSPGTLSLSPGERATLSCRASQSVSSSYLAWYQQKPGQAPRLLIYGASSRATGIPDRFSGSGSGTDFTLTISRLEPEDFAVYYCQQYGSSPLTFGGGTKLEIKSGGGGSEVQLVESGGGLVQPGGSLKLSCAASGFTFNKYAMNWVRQAPGKGLEWVARIRSKYNNYATYYADSVKDRFTISRDDSKNTAYLQMNNLKTEDTAVYYCVRHGNFGNSYISYWAYWGQGTLVTVSSGGGGSGGGGSGGGGSQTVVTQEPSLTVSPGGTVTLTCGSSTGAVTSGNYPNWVQQKPGQAPRGLIGGTKFLAPGTPARFSGSLLGGKAALTLSGVQPEDEAEYYCVLWYSNRWVFGGGTKLTVLGGGGSQRFCTGHFGGLHPCNGHHHHHH

SEQ ID NO: 242 - protein, 546 aa, Artificial Sequence
  Synthetic polypeptide
QRFVTGHFGGLHPANGGGGGSQVQLQESGPGLVKPSQTLSLTCTVSGGSISSGGYYWSWIRQHPGKGLEWIGYIFYSGRTYYNPSLKSRVTISVDTSKNQFSLKLRSVTAADTAVYYCARVYSNYGWFDPWGQGTLVTVSSGGGGSGGGGSGGGGSEIVLTQSPGTLSLSPGERATLSCRASQSVSSSYLAWYQQKPGQAPRLLIYGASSRATGIPDRFSGSGSGTDFTLTISRLEPEDFAVYYCQQYGSSPLTFGGGTKLEIKSGGGGSEVQLVESGGGLVQPGGSLKLSCAASGFTFNKYAMNWVRQAPGKGLEWVARIRSKYNNYATYYADSVKDRFTISRDDSKNTAYLQMNNLKTEDTAVYYCVRHGNFGNSYISYWAYWGQGTLVTVSSGGGGSGGGGSGGGGSQTVVTQEPSLTVSPGGTVTLTCGSSTGAVTSGNYPNWVQQKPGQAPRGLIGGTKFLAPGTPARFSGSLLGGKAALTLSGVQPEDEAEYYCVLWYSNRWVFGGGTKLTVLGGGGSQRFCTGHFGGLHPCNGHHHHHH

SEQ ID NO: 243 - protein, 546 aa, Artificial Sequence
  Synthetic polypeptide
QRFVTGHFGGLHPANGGGGGSQVQLQESGPGLVKPSQTLSLTCTVSGGSISSGGYYWSWIRQHPGKGLEWIGYIYYSGSTFYNPSLRSRVTISVDTSKNQFSLKLSSVTAADTAVYYCARDSSSSRALDYWGQGTLVTVSSGGGGSGGGGSGGGGSEIVLTQSPGTLSLSPGERATLSCRASQSVSSSYLAWYQQKPGQAPRLLIYGASSRATGIPDRFSGSGSGTDFTLTISRLEPEDFAVYYCQQYDSSPRTFGQGTKLEIKSGGGGSEVQLVESGGGLVQPGGSLKLSCAASGFTFNKYAMNWVRQAPGKGLEWVARIRSKYNNYATYYADSVKDRFTISRDDSKNTAYLQMNNLKTEDTAVYYCVRHGNFGNSYISYWAYWGQGTLVTVSSGGGGSGGGGSGGGGSQTVVTQEPSLTVSPGGTVTLTCGSSTGAVTSGNYPNWVQQKPGQAPRGLIGGTKFLAPGTPARFSGSLLGGKAALTLSGVQPEDEAEYYCVLWYSNRWVFGGGTKLTVLGGGGSQRFCTGHFGGLHPCNGHHHHHH

SEQ ID NO: 244 - protein, 546 aa, Artificial Sequence
  Synthetic polypeptide
QRFVTGHFGGLHPANGGGGGSQVQLQESGPGLVKPSQTLSLTCTVSGGSISSGGYYWSWIRQHPGKGLEWIGYIYYRGRTYYNPSLKSRVTISVDTSKNQFSLKLSSVTAADTAVYYCARVYSNYGWFDPWGQGTLVTVSSGGGGSGGGGSGGGGSEIVLTQSPGTLSLSPGERATLSCRASQSVSSSYLAWYQQKPGQAPRLLIYGASSRATGIPDRFSGSGSGTDFTLTISRLEPEDFAVYYCQQYGSSPLTFGGGTKLEIKSGGGGSEVQLVESGGGLVQPGGSLKLSCAASGFTFNKYAMNWVRQAPGKGLEWVARIRSKYNNYATYYADSVKDRFTISRDDSKNTAYLQMNNLKTEDTAVYYCVRHGNFGNSYISYWAYWGQGTLVTVSSGGGGSGGGGSGGGGSQTVVTQEPSLTVSPGGTVTLTCGSSTGAVTSGNYPNWVQQKPGQAPRGLIGGTKFLAPGTPARFSGSLLGGKAALTLSGVQPEDEAEYYCVLWYSNRWVFGGGTKLTVLGGGGSQRFCTGHFGGLHPCNGHHHHHH

SEQ ID NO: 245 - protein, 545 aa, Artificial Sequence
  Synthetic polypeptide
QRFVTGHFGGLHPANGGGGGSQVQLQESGPGLVKPSETLSLTCTVSGGSISSGGYYWSWIRQHPGKGLEWIGYIFYRGRTYYNPSLKSRVTISVDTSKNQFSLKLSSVTAADTAVYYCARVYSNYGWFDPWGQGTLVTVSSGGGGSGGGGSGGGGSEIVLTQSPGTLSLSPGERATLSCRASQSVSSSYLAWYQQKPGQAPRLLIYGASSRATGIPDRFSGSGSGTDFTLTISRLEPEDFAVYYCQQYGSSPTFGGGTKVEIKSGGGGSEVQLVESGGGLVQPGGSLKLSCAASGFTFNKYAMNWVRQAPGKGLEWVARIRSKYNNYATYYADSVKDRFTISRDDSKNTAYLQMNNLKTEDTAVYYCVRHGNFGNSYISYWAYWGQGTLVTVSSGGGGSGGGGSGGGGSQTVVTQEPSLTVSPGGTVTLTCGSSTGAVTSGNYPNWVQQKPGQAPRGLIGGTKFLAPGTPARFSGSLLGGKAALTLSGVQPEDEAEYYCVLWYSNRWVFGGGTKLTVLGGGGSQRFCTGHFGGLHPCNGHHHHHH

SEQ ID NO: 246 - protein, 546 aa, Artificial Sequence
  Synthetic polypeptide
QRFVTGHFGGLHPANGGGGGSQVQLQESGPGLVKPSQTLSLTCTVSGGSISSGGYYWSWIRQHPGKGLEWIGYIFYRGRTYYNPSLKSRVTISVDTSKNQFSLKLSSVTAADTAVYYCARVYSNYGWFDPWGQGTLVTVSSGGGGSGGGGSGGGGSEIVLTQSPGTLSLSPGERATLSCRASQSVSSSYLAWYQQKPGQAPRLLIYGASSRATGIPDRFSGSGSGTDFTLTISRLEPEDFAVYYCQQYGSSPLTFGGGTKVEIKSGGGGSEVQLVESGGGLVQPGGSLKLSCAASGFTFNKYAMNWVRQAPGKGLEWVARIRSKYNNYATYYADSVKDRFTISRDDSKNTAYLQMNNLKTEDTAVYYCVRHGNFGNSYISYWAYWGQGTLVTVSSGGGGSGGGGSGGGGSQTVVTQEPSLTVSPGGTVTLTCGSSTGAVTSGNYPNWVQQKPGQAPRGLIGGTKFLAPGTPARFSGSLLGGKAALTLSGVQPEDEAEYYCVLWYSNRWVFGGGTKLTVLGGGGSQRFCTGHFGGLHPCNGHHHHHH

SEQ ID NO: 247 - protein, 545 aa, Artificial Sequence
  Synthetic polypeptide
QRFVTGHFGGLHPANGGGGGSQVQLQESGPGLVKPSQTLSLTCTVSGGSISSGGYYWSWIRQHPGKGLEWIGYIYYRGRTYYNPSLKSRVTISVDTSKNQFSLKLSSVTAADTAVYYCARVYSNYGWFDPWGQGTLVTVSSGGGGSGGGGSGGGGSEIVLTQSPGTLSLSPGERATLSCRASQSVSSSYLAWYQQKPGQAPRLLIYGASSRATGIPDRFSGSGSGTDFTLTISRLEPEDFAVYYCQQYGSSPTFGPGTKVEIKSGGGGSEVQLVESGGGLVQPGGSLKLSCAASGFTFNKYAMNWVRQAPGKGLEWVARIRSKYNNYATYYADSVKDRFTISRDDSKNTAYLQMNNLKTEDTAVYYCVRHGNFGNSYISYWAYWGQGTLVTVSSGGGGSGGGGSGGGGSQTVVTQEPSLTVSPGGTVTLTCGSSTGAVTSGNYPNWVQQKPGQAPRGLIGGTKFLAPGTPARFSGSLLGGKAALTLSGVQPEDEAEYYCVLWYSNRWVFGGGTKLTVLGGGGSQRFCTGHFGGLHPCNGHHHHHH

SEQ ID NO: 248 - protein, 545 aa, Artificial Sequence
  Synthetic polypeptide
QRFVTGHFGGLHPANGGGGGSQVQLQESGPGLVKPSQTLSLTCTVSGGSISSGGYYWSWIRQHPGKGLEWIGYIYYRGRTYYNPSLKSRVTISVDTSKNQFSLKLSSVTAADTAVYYCARVYSNYGWFDPWGQGTLVTVSSGGGGSGGGGSGGGGSEIVLTQSPGTLSLSPGERATLSCRASQSVSSSYLAWYQQKPGQAPRLLIYGASSRATGIPDRFSGSGSGTDFTLTISRLEPEDFAVYYCQQYGSSPTFGGGTKVEIKSGGGGSEVQLVESGGGLVQPGGSLKLSCAASGFTFNKYAMNWVRQAPGKGLEWVARIRSKYNNYATYYADSVKDRFTISRDDSKNTAYLQMNNLKTEDTAVYYCVRHGNFGNSYISYWAYWGQGTLVTVSSGGGGSGGGGSGGGGSQTVVTQEPSLTVSPGGTVTLTCGSSTGAVTSGNYPNWVQQKPGQAPRGLIGGTKFLAPGTPARFSGSLLGGKAALTLSGVQPEDEAEYYCVLWYSNRWVFGGGTKLTVLGGGGSQRFCTGHFGGLHPCNGHHHHHH

SEQ ID NO: 249 - protein, 545 aa, Artificial Sequence
  Synthetic polypeptide
QRFVTGHFGGLHPANGGGGGSQVQLQESGPGLVKPSQTLSLTCTISGGSISSGGYYWSWIRQHPGKGLEWIGYIFYSGRTYYNPSLKSRVTISVDTSKNQFSLKLTSVTAADTAVYYCARVNSNYGWFDPWGQGTLVTVSSGGGGSGGGGSGGGGSEIVLTQSPGTLSLSPGERATLSCRASQSVSSSYLAWYQQKPGQAPRLLIYGASSRATGIPDRFSGSGSGTDFTLTISRLEPEDFAVYYCQQYGSSPTFGGGTKVEIKSGGGGSEVQLVESGGGLVQPGGSLKLSCAASGFTFNKYAMNWVRQAPGKGLEWVARIRSKYNNYATYYADSVKDRFTISRDDSKNTAYLQMNNLKTEDTAVYYCVRHGNFGNSYISYWAYWGQGTLVTVSSGGGGSGGGGSGGGGSQTVVTQEPSLTVSPGGTVTLTCGSSTGAVTSGNYPNWVQQKPGQAPRGLIGGTKFLAPGTPARFSGSLLGGKAALTLSGVQPEDEAEYYCVLWYSNRWVFGGGTKLTVLGGGGSQRFCTGHFGGLHPCNGHHHHHH

SEQ ID NO: 250 - protein, 546 aa, Artificial Sequence
  Synthetic polypeptide
QRFVTGHFGGLHPANGGGGGSQVQLQESGPGLVKPSQTLSLTCTVSGGSISSGGYYWSWIRQHPGKGLDWIGYIFYRGRTYYNPSLKSRVTISVDTSKNQFSLKLSSVTAADTAVYYCARVNSNYGWFDPWGQGTLVTVSSGGGGSGGGGSGGGGSEIVLTQSPGTLSLSPGERATLSCRASQSVSSSYLAWYQQKPGQAPRLLIYGASSRATGIPDRFSGSGSGTDFTLTISRLEPEDFAVYYCQQYGSSPLTFGGGTKVEIKSGGGGSEVQLVESGGGLVQPGGSLKLSCAASGFTFNKYAMNWVRQAPGKGLEWVARIRSKYNNYATYYADSVKDRFTISRDDSKNTAYLQMNNLKTEDTAVYYCVRHGNFGNSYISYWAYWGQGTLVTVSSGGGGSGGGGSGGGGSQTVVTQEPSLTVSPGGTVTLTCGSSTGAVTSGNYPNWVQQKPGQAPRGLIGGTKFLAPGTPARFSGSLLGGKAALTLSGVQPEDEAEYYCVLWYSNRWVFGGGTKLTVLGGGGSQRFCTGHFGGLHPCNGHHHHHH

SEQ ID NO: 251 - protein, 545 aa, Artificial Sequence
  Synthetic polypeptide
QRFVTGHFGGLHPANGGGGGSQVQLQESGPGLVKPSQTLSLTCTVSGGSISSGGYYWSWIRQHPGKGLEWIGYIYYRGRTYYNPSLKSRVTISVDTSKNQFSLKLSSVTAADTAVYYCARVYSNYGWFDPWGQGTLVTVSSGGGGSGGGGSGGGGSEIVLTQSPGTLSLSPGERATLSCRASQSVSSSYLAWYQQKPGQAPRLLIYGASTRATGIPDRFSGSGSGTDFTLTISRLEPEDFAVYYCQQYGSSPSFGQGTKVEIKSGGGGSEVQLVESGGGLVQPGGSLKLSCAASGFTFNKYAMNWVRQAPGKGLEWVARIRSKYNNYATYYADSVKDRFTISRDDSKNTAYLQMNNLKTEDTAVYYCVRHGNFGNSYISYWAYWGQGTLVTVSSGGGGSGGGGSGGGGSQTVVTQEPSLTVSPGGTVTLTCGSSTGAVTSGNYPNWVQQKPGQAPRGLIGGTKFLAPGTPARFSGSLLGGKAALTLSGVQPEDEAEYYCVLWYSNRWVFGGGTKLTVLGGGGSQRFCTGHFGGLHPCNGHHHHHH

SEQ ID NO: 252 - protein, 546 aa, Artificial Sequence
  Synthetic polypeptide
QRFVTGHFGGLHPANGGGGGSQVQLQESGPGLVRPSQTLSLTCTVSGGSISSGGYYWSWIRQHPGKGLEWIGYIYYRGRTYYNPSLKSRVTISVDTSKNQFSLKLSSVTAADTAVYYCARVYSNYGWFDPWGQGTLVTVSSGGGGSGGGGSGGGGSEIVLTQSPGTLSLSPGERATLSCRASQSVSSSYLAWYQQKPGQAPRLLIYGASSRATGIPDRFSGSGSGTDFTLTISRLEPEDFAVYYCQQYDTSPLTFGGGTKVEIKSGGGGSEVQLVESGGGLVQPGGSLKLSCAASGFTFNKYAMNWVRQAPGKGLEWVARIRSKYNNYATYYADSVKDRFTISRDDSKNTAYLQMNNLKTEDTAVYYCVRHGNFGNSYISYWAYWGQGTLVTVSSGGGGSGGGGSGGGGSQTVVTQEPSLTVSPGGTVTLTCGSSTGAVTSGNYPNWVQQKPGQAPRGLIGGTKFLAPGTPARFSGSLLGGKAALTLSGVQPEDEAEYYCVLWYSNRWVFGGGTKLTVLGGGGSQRFCTGHFGGLHPCNGHHHHHH

SEQ ID NO: 253 - protein, 545 aa, Artificial Sequence; identical to SEQ ID NO: 248
  Synthetic polypeptide

SEQ ID NO: 254 - protein, 546 aa, Artificial Sequence
  Synthetic polypeptide
QRFVTGHFGGLHPANGGGGGSQVQLQESGPGLVKPSQTLSLTCTVSGGSISSGGYYWSWIRQHPGKGLEWIGYIYYRGRTYYNPSLKSRVTISVDTSKNQFSLKLSSVTAADTAVYYCARVYSNYGWFDPWGQGTLVTVSSGGGGSGGGGSGGGGSEIVLTQSPGTLSLSPGERATLSCRASQSVSSSYLAWYQQKPGQAPRLLIYGASSRATGIPDRFSGSGSGTDFTLTISRLEPEDFAVYYCQQYGSSPLTFGGGTKVEIKSGGGGSEVQLVESGGGLVQPGGSLKLSCAASGFTFNKYAMNWVRQAPGKGLEWVARIRSKYNNYATYYADSVKDRFTISRDDSKNTAYLQMNNLKTEDTAVYYCVRHGNFGNSYISYWAYWGQGTLVTVSSGGGGSGGGGSGGGGSQTVVTQEPSLTVSPGGTVTLTCGSSTGAVTSGNYPNWVQQKPGQAPRGLIGGTKFLAPGTPARFSGSLLGGKAALTLSGVQPEDEAEYYCVLWYSNRWVFGGGTKLTVLGGGGSQRFCTGHFGGLHPCNGHHHHHH

SEQ ID NO: 255 - protein, 546 aa, Artificial Sequence
  Synthetic polypeptide
QRFVTGHFGGLHPANGGGGGSQVQLQESGPGLVKPSQTLSLTCTVSGGSISSGGYYWSWVRQHPGKGLEWIGYIFYSGRTYYNPSLKSRVIISVDTSKNQFSLKLSSVTAADTAVYYCARVYSNYGWFDPWGQGTLVTVSSGGGGSGGGGSGGGGSEIVLTQSPGTLSLSPGERATLSCRASQSVSSSYLAWYQQKPGQAPRLLIYGASSRATGIPDRFSGSGSGTDFTLTISRLEPEDFAVYYCQQYGSSPLTFGGGTKVEIKSGGGGSEVQLVESGGGLVQPGGSLKLSCAASGFTFNKYAMNWVRQAPGKGLEWVARIRSKYNNYATYYADSVKDRFTISRDDSKNTAYLQMNNLKTEDTAVYYCVRHGNFGNSYISYWAYWGQGTLVTVSSGGGGSGGGGSGGGGSQTVVTQEPSLTVSPGGTVTLTCGSSTGAVTSGNYPNWVQQKPGQAPRGLIGGTKFLAPGTPARFSGSLLGGKAALTLSGVQPEDEAEYYCVLWYSNRWVFGGGTKLTVLGGGGSQRFCTGHFGGLHPCNGHHHHHH

SEQ ID NO: 256 - protein, 546 aa, Artificial Sequence
  Synthetic polypeptide
QRFVTGHFGGLHPANGGGGGSQVQLQESGPGLVKPSQTLSLTCTVSGGSISSGGYYWSWIRQHPGKGLEWIGYIFYSGRTYYNPSLKSRVTISVDTSKNQFSLKLSSVTAADTAVYYCARVYSNYGWFDPWGQGTLVTVSSGGGGSGGGGSGGGGSEIVLTQSPGTLSLSPGERATLSCRASQSVSSSYLAWYQQKPGQAPRLLIYGASSRATGIPDRFSGSGSGTDFTLTISRLEPEDFAVYYCQQYGSSPLTFGGGTKVEIKSGGGGSEVQLVESGGGLVQPGGSLKLSCAASGFTFNKYAMNWVRQAPGKGLEWVARIRSKYNNYATYYADSVKDRFTISRDDSKNTAYLQMNNLKTEDTAVYYCVRHGNFGNSYISYWAYWGQGTLVTVSSGGGGSGGGGSGGGGSQTVVTQEPSLTVSPGGTVTLTCGSSTGAVTSGNYPNWVQQKPGQAPRGLIGGTKFLAPGTPARFSGSLLGGKAALTLSGVQPEDEAEYYCVLWYSNRWVFGGGTKLTVLGGGGSQRFCTGHFGGLHPCNGHHHHHH

SEQ ID NO: 257 - protein, 546 aa, Artificial Sequence
  Synthetic polypeptide
QRFVTGHFGGLHPANGGGGGSQVQLQESGPGLVKPSQTLSLTCTVSGGSISSGGYYWSWIRQHPGKGLEWIGYIFYSGRTYYNPSLKSRVSISVDTSKNQFSLKLSSVTAADTAVYYCARVYSNYGWFDPWGQGTLVTVSSGGGGSGGGGSGGGGSEIVLTQSPGTLSLSPGERATLSCRASQSVSSSYLAWYQQKPGQAPRLLIYGASSRATGIPDRFSGSGSGTDFTLTISRLEPEDFAVYYCQQYGSSPLTFGGGTKVEIKSGGGGSEVQLVESGGGLVQPGGSLKLSCAASGFTFNKYAMNWVRQAPGKGLEWVARIRSKYNNYATYYADSVKDRFTISRDDSKNTAYLQMNNLKTEDTAVYYCVRHGNFGNSYISYWAYWGQGTLVTVSSGGGGSGGGGSGGGGSQTVVTQEPSLTVSPGGTVTLTCGSSTGAVTSGNYPNWVQQKPGQAPRGLIGGTKFLAPGTPARFSGSLLGGKAALTLSGVQPEDEAEYYCVLWYSNRWVFGGGTKLTVLGGGGSQRFCTGHFGGLHPCNGHHHHHH

SEQ ID NO: 258 - protein, 546 aa, Artificial Sequence
  Synthetic polypeptide
QRFVTGHFGGLHPANGGGGGSQVQLQESGPGLVKPSETLSLTCTVSGGSVSSGGYYWSWIRQPPGKGLEWIGYIYYRGRTYYNPSLKSRVTISVDTSKNQFSLKLSSVTAADTAVYYCARVYSNYGWFDPWGQGTLVTVSSGGGGSGGGGSGGGGSEIVLTQSPGTLSLSPGERATLSCRASQSVSSSYLAWYQQKPGQAPRLLIYGASSRATGIPDRFSGSGSGTDFTLTISRLEPEDFAVYYCQQYGSSPLTFGGGTKVEIKSGGGGSEVQLVESGGGLVQPGGSLKLSCAASGFTFNKYAMNWVRQAPGKGLEWVARIRSKYNNYATYYADSVKDRFTISRDDSKNTAYLQMNNLKTEDTAVYYCVRHGNFGNSYISYWAYWGQGTLVTVSSGGGGSGGGGSGGGGSQTVVTQEPSLTVSPGGTVTLTCGSSTGAVTSGNYPNWVQQKPGQAPRGLIGGTKFLAPGTPARFSGSLLGGKAALTLSGVQPEDEAEYYCVLWYSNRWVFGGGTKLTVLGGGGSQRFCTGHFGGLHPCNGHHHHHH

SEQ ID NO: 259 - protein, 545 aa, Artificial Sequence
  Synthetic polypeptide
QRFVTGHFGGLHPANGGGGGSQVQLQESGPGLVKPSQTLSLTCTVSGGSISSGGYYWSWIRQHPGKGLEWIGYIYYRGRTYYNPSLKSRVTISVDTSKNQFSLKLSSVTAADTAVYYCARVYSNYGWFDPWGQGTLVTVSSGGGGSGGGGSGGGGSEIVLTQSPGTLSLSPGERATLSCRASQSVSSSYLAWYQQKPGQAPRLLIYGASSRATGIPDRFSGSGSGTDFTLTISRLEPEDFAVYYCQQYGSSPTFGQGTRLEIKSGGGGSEVQLVESGGGLVQPGGSLKLSCAASGFTFNKYAMNWVRQAPGKGLEWVARIRSKYNNYATYYADSVKDRFTISRDDSKNTAYLQMNNLKTEDTAVYYCVRHGNFGNSYISYWAYWGQGTLVTVSSGGGGSGGGGSGGGGSQTVVTQEPSLTVSPGGTVTLTCGSSTGAVTSGNYPNWVQQKPGQAPRGLIGGTKFLAPGTPARFSGSLLGGKAALTLSGVQPEDEAEYYCVLWYSNRWVFGGGTKLTVLGGGGSQRFCTGHFGGLHPCNGHHHHHH

SEQ ID NO: 260 - protein, 546 aa, Artificial Sequence
  Synthetic polypeptide
QRFVTGHFGGLHPANGGGGGSQVQLQESGPGLVKPSQTLSLTCTVSGGSISSGGYYWSWIRQHPGKGLEWIGYIFYSGKTYYNPSLKSRVSISVDTSKNQFSLKLSSVTAADTAVYYCARVYSNYGWFDPWGQGTLVTVSSGGGGSGGGGSGGGGSEIVLTQSPGTLSLSPGERATLSCRASQSVSSSYLAWYQQKPGQAPRLLIYGASSRATGIPDRFSGSGSGTDFTLTISRLEPEDFAVYYCQQYGSSPITFGQGTRLEIKSGGGGSEVQLVESGGGLVQPGGSLKLSCAASGFTFNKYAMNWVRQAPGKGLEWVARIRSKYNNYATYYADSVKDRFTISRDDSKNTAYLQMNNLKTEDTAVYYCVRHGNFGNSYISYWAYWGQGTLVTVSSGGGGSGGGGSGGGGSQTVVTQEPSLTVSPGGTVTLTCGSSTGAVTSGNYPNWVQQKPGQAPRGLIGGTKFLAPGTPARFSGSLLGGKAALTLSGVQPEDEAEYYCVLWYSNRWVFGGGTKLTVLGGGGSQRFCTGHFGGLHPCNGHHHHHH

SEQ ID NO: 261 - protein, 551 aa, Artificial Sequence
  Synthetic polypeptide
QRFVTGHFGGLHPANGGGGGSQVQLQESGPGLVKPSETLSLTCTVSGGSISSYYWSWIRQPPGKGLEWIGYIYYSGSTNYNPSLKSRVTMSIDTSKNQFSLKLISVTAADTAVYYCARDQRRIVAAGGYYYGMDVWGQGTTVTVSSGGGGSGGGGSGGGGSEIVLTQSPGTLSLSPGERATLSCRASQSVSSSYLAWYQQKPGQAPRLLIYGASTRATGIPARFSGSGSGTDFTLTISRLEPEDFAVYYCQQYGSSPFTFGPGTKVDIKSGGGGSEVQLVESGGGLVQPGGSLKLSCAASGFTFNKYAMNWVRQAPGKGLEWVARIRSKYNNYATYYADSVKDRFTISRDDSKNTAYLQMNNLKTEDTAVYYCVRHGNFGNSYISYWAYWGQGTLVTVSSGGGGSGGGGSGGGGSQTVVTQEPSLTVSPGGTVTLTCGSSTGAVTSGNYPNWVQQKPGQAPRGLIGGTKFLAPGTPARFSGSLLGGKAALTLSGVQPEDEAEYYCVLWYSNRWVFGGGTKLTVLGGGGSQRFCTGHFGGLHPCNGHHHHHH

SEQ ID NO: 262 - protein, 545 aa, Artificial Sequence
  Synthetic polypeptide
QRFVTGHFGGLHPANGGGGGSQVQLQESGPGLVKPSQTLSLTCTVSGGSISSNDYYWSWIRQHPGKGLEWIGYIYYSGSTFYNPSLKSRGAISVDTSKNQFSLKLTSVTAADTAVYYCARGVYRTGAFDIWGQGTMVTVSSGGGGSGGGGSGGGGSDIQMTQSPSSLSASVGDRVTITCRASQSISSYLNWYQQKPGKAPKSLIYAASSLQSGVPSKFSGSGSGTDFTLTISSLQPEDIATYYCQQSYSTPQAFGGGTKVDIKSGGGGSEVQLVESGGGLVQPGGSLKLSCAASGFTFNKYAMNWVRQAPGKGLEWVARIRSKYNNYATYYADSVKDRFTISRDDSKNTAYLQMNNLKTEDTAVYYCVRHGNFGNSYISYWAYWGQGTLVTVSSGGGGSGGGGSGGGGSQTVVTQEPSLTVSPGGTVTLTCGSSTGAVTSGNYPNWVQQKPGQAPRGLIGGTKFLAPGTPARFSGSLLGGKAALTLSGVQPEDEAEYYCVLWYSNRWVFGGGTKLTVLGGGGSQRFCTGHFGGLHPCNGHHHHHH

SEQ ID NO: 263 - protein, 546 aa, Artificial Sequence
  Synthetic polypeptide
QRFVTGHFGGLHPANGGGGGSQVQLVQSGAEVKKPGASVKVSCKASGYTFTYYGISWVRQAPGQGLEWMGWINPYGGETNYAQKLQGRVTMTTDTSTSTAYMELRSLRSDDTAVYYCARGSGGFDYWGQGTLVTVSSGGGGSGGGGSGGGGSDIVMTQTPLSLSVTPGEPASISCRSSQSLLHSNGYNYLDWYLQKPGQSPQLLIYLGSYRASGVPDRFSGSGSGTDFTLKISRVEAEDVGVYYCMQALQTPFTFGPGTKVDIKSGGGGSEVQLVESGGGLVQPGGSLKLSCAASGFTFNKYAMNWVRQAPGKGLEWVARIRSKYNNYATYYADSVKDRFTISRDDSKNTAYLQMNNLKTEDTAVYYCVRHGNFGNSYISYWAYWGQGTLVTVSSGGGGSGGGGSGGGGSQTVVTQEPSLTVSPGGTVTLTCGSSTGAVTSGNYPNWVQQKPGQAPRGLIGGTKFLAPGTPARFSGSLLGGKAALTLSGVQPEDEAEYYCVLWYSNRWVFGGGTKLTVLGGGGSQRFCTGHFGGLHPCNGHHHHHH

SEQ ID NO: 264 - protein, 546 aa, Artificial Sequence
  Synthetic polypeptide
QRFVTGHFGGLHPANGGGGGSQVQLVQSGAEVKKPGASVKVSCKASGYTFTYYGISWVRQAPGQGLEWMGWINPYSGATNYAQKLQGRVTMTTDTSTSTAYMELRSLRSDDTAVYYCARGSGGFDYWGQGTLVTVSSGGGGSGGGGSGGGGSDIVMTQTPLSLSVTPGEPASISCRSSQSLLHSNGYNYLDWYLQKPGQSPQLLIYLGSYRASGVPDRFSGSGSGTDFTLKISRVEAEDVGVYYCMQALQTPFTFGPGTKVDIKSGGGGSEVQLVESGGGLVQPGGSLKLSCAASGFTFNKYAMNWVRQAPGKGLEWVARIRSKYNNYATYYADSVKDRFTISRDDSKNTAYLQMNNLKTEDTAVYYCVRHGNFGNSYISYWAYWGQGTLVTVSSGGGGSGGGGSGGGGSQTVVTQEPSLTVSPGGTVTLTCGSSTGAVTSGNYPNWVQQKPGQAPRGLIGGTKFLAPGTPARFSGSLLGGKAALTLSGVQPEDEAEYYCVLWYSNRWVFGGGTKLTVLGGGGSQRFCTGHFGGLHPCNGHHHHHH

SEQ ID NO: 265 - protein, 546 aa, Artificial Sequence
  Synthetic polypeptide
QRFVTGHFGGLHPANGGGGGSQVQLVQSGAEVKKPGASVKVSCKASGYTFTYYGISWVRQAPGQGLEWMGWINPYTGKTNYAQKLQGRVTMTTDTSTSTAYMELRSLRSDDTAVYYCARGSGGFDYWGQGTLVTVSSGGGGSGGGGSGGGGSDIVMTQTPLSLSVTPGEPASISCRSSQSLLHSNGYNYLDWYLQKPGQSPQLLIYLGSYRASGVPDRFSGSGSGTDFTLKISRVEAEDVGVYYCMQALQTPFTFGPGTKVDIKSGGGGSEVQLVESGGGLVQPGGSLKLSCAASGFTFNKYAMNWVRQAPGKGLEWVARIRSKYNNYATYYADSVKDRFTISRDDSKNTAYLQMNNLKTEDTAVYYCVRHGNFGNSYISYWAYWGQGTLVTVSSGGGGSGGGGSGGGGSQTVVTQEPSLTVSPGGTVTLTCGSSTGAVTSGNYPNWVQQKPGQAPRGLIGGTKFLAPGTPARFSGSLLGGKAALTLSGVQPEDEAEYYCVLWYSNRWVFGGGTKLTVLGGGGSQRFCTGHFGGLHPCNGHHHHHH

SEQ ID NO: 266 - protein, 546 aa, Artificial Sequence
  Synthetic polypeptide
QRFVTGHFGGLHPANGGGGGSQVQLVQSGAEVKKPGASVKVSCKASGYTFTYYGISWVRQAPGQGLEWMGWINPYTGKTNYAQKLQGRVTMTTDTSTSTAYMELRSLRSDDTAVYYCARGSGGFDYWGQGTLVTVSSGGGGSGGGGSGGGGSDIVMTQTPLSLSVTPGEPASISCRSSQSLLHSVGYNYLDWYLQKPGQSPQLLIYLGSYRASGVPDRFSGSGSGTDFTLKISRVEAEDVGVYYCMQALQTPFTFGPGTKVDIKSGGGGSEVQLVESGGGLVQPGGSLKLSCAASGFTFNKYAMNWVRQAPGKGLEWVARIRSKYNNYATYYADSVKDRFTISRDDSKNTAYLQMNNLKTEDTAVYYCVRHGNFGNSYISYWAYWGQGTLVTVSSGGGGSGGGGSGGGGSQTVVTQEPSLTVSPGGTVTLTCGSSTGAVTSGNYPNWVQQKPGQAPRGLIGGTKFLAPGTPARFSGSLLGGKAALTLSGVQPEDEAEYYCVLWYSNRWVFGGGTKLTVLGGGGSQRFCTGHFGGLHPCNGHHHHHH

SEQ ID NO: 267 - protein, 546 aa, Artificial Sequence
  Synthetic polypeptide
QRFVTGHFGGLHPANGGGGGSQVQLVQSGAEVKKPGASVKVSCKASGYTFTSYGISWVRQAPGQGLEWMGWINPYTGNRNYAQKVQDRVTMTTDTSTNTAYMELSSLRSDDTAVYYCARGSGGFDYWGQGTLVTVSSGGGGSGGGGSGGGGSDIVMTQSPLSLPVTLGQPASISCRSSQSLLHSVGYNYLDWYLQKPGQSPQLLIYLGSNRASGVPDRFSGSGSGTDFTLKISRVEAEDVGVYYCMQALQTPFTFGPGTKLEIKSGGGGSEVQLVESGGGLVQPGGSLKLSCAASGFTFNKYAMNWVRQAPGKGLEWVARIRSKYNNYATYYADSVKDRFTISRDDSKNTAYLQMNNLKTEDTAVYYCVRHGNFGNSYISYWAYWGQGTLVTVSSGGGGSGGGGSGGGGSQTVVTQEPSLTVSPGGTVTLTCGSSTGAVTSGNYPNWVQQKPGQAPRGLIGGTKFLAPGTPARFSGSLLGGKAALTLSGVQPEDEAEYYCVLWYSNRWVFGGGTKLTVLGGGGSQRFCTGHFGGLHPCNGHHHHHH

SEQ ID NO: 268 - protein, 546 aa, Artificial Sequence
  Synthetic polypeptide
QRFVTGHFGGLHPANGGGGGSQVQLVQSGAEVKKPGASVKVSCKASGYTFTYYGISWVRQAPGQGLEWMGWINPYTGKTNYAQKLQDRVTMTTDTSTNTAYMELRSLRSDDTAVYYCARGSGGFDYWGQGTLVTVSSGGGGSGGGGSGGGGSDIVMTQTPLSLPVTPGEPASISCRSSQSLLHSVGYNYLDWYLQKPGQSPQLLIYLGSNRASGVPDRFSGSGSGTDFTLKISRVEAEDVGVYYCMQALQTPFTFGPGTKVDIKSGGGGSEVQLVESGGGLVQPGGSLKLSCAASGFTFNKYAMNWVRQAPGKGLEWVARIRSKYNNYATYYADSVKDRFTISRDDSKNTAYLQMNNLKTEDTAVYYCVRHGNFGNSYISYWAYWGQGTLVTVSSGGGGSGGGGSGGGGSQTVVTQEPSLTVSPGGTVTLTCGSSTGAVTSGNYPNWVQQKPGQAPRGLIGGTKFLAPGTPARFSGSLLGGKAALTLSGVQPEDEAEYYCVLWYSNRWVFGGGTKLTVLGGGGSQRFCTGHFGGLHPCNGHHHHHH

SEQ ID NO: 269 - protein, 546 aa, Artificial Sequence
  Synthetic polypeptide
QRFVTGHFGGLHPANGGGGGSQVQLVQSGAEVKKPGASVKVSCKASGYTFTTYGISWVRQAPGQGLEWMGWINPYTGKTNYAQKLQGRVTMATDTSTSTAYMELRSLRSDDTAVYYCARGSGGFDYWGQGTLVTVSSGGGGSGGGGSGGGGSDIVMTQSPLSLPVTPGEPASISCRSSQSLLHSVGYNYLDWYLQKPGQSPQLLIYLGSNRASGVPDRFSGSGSGTDFTLKISRVEAEDVGVYYCMQALQTPFTFGPGTKLEIKSGGGGSEVQLVESGGGLVQPGGSLKLSCAASGFTFNKYAMNWVRQAPGKGLEWVARIRSKYNNYATYYADSVKDRFTISRDDSKNTAYLQMNNLKTEDTAVYYCVRHGNFGNSYISYWAYWGQGTLVTVSSGGGGSGGGGSGGGGSQTVVTQEPSLTVSPGGTVTLTCGSSTGAVTSGNYPNWVQQKPGQAPRGLIGGTKFLAPGTPARFSGSLLGGKAALTLSGVQPEDEAEYYCVLWYSNRWVFGGGTKLTVLGGGGSQRFCTGHFGGLHPCNGHHHHHH

SEQ ID NO: 270 - protein, 546 aa, Artificial Sequence
  Synthetic polypeptide
QRFVTGHFGGLHPANGGGGGSQVQLVQSGAEVKEPGASVKVSCKASGYTFTYYGISWVRQAPGQGLEWMGWINPYTGNRNYAQKVQDRVTMTTDTSTNTAYMELRSLRSDDTAVYYCARGSGGFDYWGQGTLVTVSSGGGGSGGGGSGGGGSDIVMTQSPLSLPVTPGEPASISCRSSQSLLHSVGYNYLDWYLQKPGQSPQLLIYLGSNRASGVPDRFSGSGSGTDFTLKISRVEAEDVGVYYCMQALQTPFTFGPGTKLEIKSGGGGSEVQLVESGGGLVQPGGSLKLSCAASGFTFNKYAMNWVRQAPGKGLEWVARIRSKYNNYATYYADSVKDRFTISRDDSKNTAYLQMNNLKTEDTAVYYCVRHGNFGNSYISYWAYWGQGTLVTVSSGGGGSGGGGSGGGGSQTVVTQEPSLTVSPGGTVTLTCGSSTGAVTSGNYPNWVQQKPGQAPRGLIGGTKFLAPGTPARFSGSLLGGKAALTLSGVQPEDEAEYYCVLWYSNRWVFGGGTKLTVLGGGGSQRFCTGHFGGLHPCNGHHHHHH

SEQ ID NO: 271 - protein, 546 aa, Artificial Sequence
  Synthetic polypeptide
QRFVTGHFGGLHPANGGGGGSQVQLVQSGAEVKKPGASVKVSCKASGYTFTYYGISWVRQAPGQGLEWMGWINPYTGKTNYAQKLQGRVTMTTDTSTSTAYMELRSLRSDDTAVYYCARGSGGFDYWGQGTLVTVSSGGGGSGGGGSGGGGSDIVMTQSPLSLPVTPGEPASISCRSSQSLLHSVGYNYLDWYLQKPGQSPQLLIYLGSNRASGVPDRFSGSGSGTDFTLKISRVEAEDVGVYYCMQALQTPFTFGPGTKVEIKSGGGGSEVQLVESGGGLVQPGGSLKLSCAASGFTFNKYAMNWVRQAPGKGLEWVARIRSKYNNYATYYADSVKDRFTISRDDSKNTAYLQMNNLKTEDTAVYYCVRHGNFGNSYISYWAYWGQGTLVTVSSGGGGSGGGGSGGGGSQTVVTQEPSLTVSPGGTVTLTCGSSTGAVTSGNYPNWVQQKPGQAPRGLIGGTKFLAPGTPARFSGSLLGGKAALTLSGVQPEDEAEYYCVLWYSNRWVFGGGTKLTVLGGGGSQRFCTGHFGGLHPCNGHHHHHH

SEQ ID NO: 272 - protein, 546 aa, Artificial Sequence
  Synthetic polypeptide
QRFVTGHFGGLHPANGGGGGSQVQLVQSGAEVKKPGASVKVSCKASGYTFTSYGITWVRQAPGQGLEWMGWINPYTGNRNYAQKVQGRVTMTTDTSTSTAYMELRSLRSDDTAVYYCARGSGGFDYWGQGTLVTVSSGGGGSGGGGSGGGGSDIVMTQSPLSLSVTPGEPASISCRSSQSLLHSVGYNYLDWYLQKPGQSPQLLIYLGSNRASGVPDRFSGSGSGTDFTLKISRVEAEDVGVYYCMQALQTPFTFGPGTKVDIKSGGGGSEVQLVESGGGLVQPGGSLKLSCAASGFTFNKYAMNWVRQAPGKGLEWVARIRSKYNNYATYYADSVKDRFTISRDDSKNTAYLQMNNLKTEDTAVYYCVRHGNFGNSYISYWAYWGQGTLVTVSSGGGGSGGGGSGGGGSQTVVTQEPSLTVSPGGTVTLTCGSSTGAVTSGNYPNWVQQKPGQAPRGLIGGTKFLAPGTPARFSGSLLGGKAALTLSGVQPEDEAEYYCVLWYSNRWVFGGGTKLTVLGGGGSQRFCTGHFGGLHPCNGHHHHHH

SEQ ID NO: 273 - protein, 546 aa, Artificial Sequence
  Synthetic polypeptide
QRFVTGHFGGLHPANGGGGGSQVQLVQSGAEVKKPGASVKVSCKASGYTFTSYGISWVRQAPGQGLEWMGWINPYTGNRNYAQKFQGRVTMTTDTSTNTAYMELSSLRSEDTAVYYCARGSGGFDYWGQGTLVTVSSGGGGSGGGGSGGGGSDIVMTQSPLSLPVTPGEPASISCRSSQSLLHSVGYNYLDWYLQKPGQSPQLLIYLGSNRASGVPDRFSGSGSGTDFTLKISRVEAEDVGVYYCMQALQTPFTFGPGTKVDIKSGGGGSEVQLVESGGGLVQPGGSLKLSCAASGFTFNKYAMNWVRQAPGKGLEWVARIRSKYNNYATYYADSVKDRFTISRDDSKNTAYLQMNNLKTEDTAVYYCVRHGNFGNSYISYWAYWGQGTLVTVSSGGGGSGGGGSGGGGSQTVVTQEPSLTVSPGGTVTLTCGSSTGAVTSGNYPNWVQQKPGQAPRGLIGGTKFLAPGTPARFSGSLLGGKAALTLSGVQPEDEAEYYCVLWYSNRWVFGGGTKLTVLGGGGSQRFCTGHFGGLHPCNGHHHHHH

SEQ ID NO: 274 - protein, 546 aa, Artificial Sequence
  Synthetic polypeptide
QRFVTGHFGGLHPANGGGGGSQVQLVQSGAEVKKPGASVKVSCKASGYSFTSYGISWVRQAPGQGLEWMGWINPYTGNRNYAQKVQGRVTMTTDTSTSTAYMELRSLRSDDTAVYYCARGSGGFDYWGQGTLVTVSSGGGGSGGGGSGGGGSDIVMTQSPLSLPVTPGEPASISCRSSQSLLHSVGYNYLDWYLQKPGQSPQLLIYLGSNRASGVPDRFSGSGSGTDFTLKISRVEAEDVGVYYCMQALQTPFTFGPGTKVEIKSGGGGSEVQLVESGGGLVQPGGSLKLSCAASGFTFNKYAMNWVRQAPGKGLEWVARIRSKYNNYATYYADSVKDRFTISRDDSKNTAYLQMNNLKTEDTAVYYCVRHGNFGNSYISYWAYWGQGTLVTVSSGGGGSGGGGSGGGGSQTVVTQEPSLTVSPGGTVTLTCGSSTGAVTSGNYPNWVQQKPGQAPRGLIGGTKFLAPGTPARFSGSLLGGKAALTLSGVQPEDEAEYYCVLWYSNRWVFGGGTKLTVLGGGGSQRFCTGHFGGLHPCNGHHHHHH

SEQ ID NO: 275 - protein, 546 aa, Artificial Sequence
  Synthetic polypeptide
QRFVTGHFGGLHPANGGGGGSQVQLVQSGAEVKKPGASVKVSCKASGYTFTYYGISWVRQAPGQGLEWMGWINPYTGKTNYAQKVQGRVTMTTDTSTSTAYMELRNLRSDDTAVYYCARGSGGFDYWGQGTLVTVSSGGGGSGGGGSGGGGSDIVMTQTPLSLSVTPGQPASISCRSSQSLLHSVGYNYLDWYLQKPGQSPQLLIYLGSNRASGVPDRFSGSGSGTDFTLKISRVEAEDVGVYYCMQALQTPFTFGPGTKVDIKSGGGGSEVQLVESGGGLVQPGGSLKLSCAASGFTFNKYAMNWVRQAPGKGLEWVARIRSKYNNYATYYADSVKDRFTISRDDSKNTAYLQMNNLKTEDTAVYYCVRHGNFGNSYISYWAYWGQGTLVTVSSGGGGSGGGGSGGGGSQTVVTQEPSLTVSPGGTVTLTCGSSTGAVTSGNYPNWVQQKPGQAPRGLIGGTKFLAPGTPARFSGSLLGGKAALTLSGVQPEDEAEYYCVLWYSNRWVFGGGTKLTVLGGGGSQRFCTGHFGGLHPCNGHHHHHH

SEQ ID NO: 276 - protein, 546 aa, Artificial Sequence
  Synthetic polypeptide
QRFVTGHFGGLHPANGGGGGSQVQLVQSGAEVKKPGASVKVSCKASGYTFTYYGISWVRQAPGQGLEWMGWINPYTGKTNYAQKLQGRVTMTTDTSTSTAYMELRSLRSDDTAVYYCARGSGGFDYWGQGTLVTVSSGGGGSGGGGSGGGGSDIVMTQTPLSLSVTPGQPASISCRSSQSLLHSVGYNYLDWYLQKPGQSPQLLIYLGSNRASGVPDRFSGSGSGTDFTLKISRVEAEDVGVYYCMQALQTPFTFGPGTKVDIKSGGGGSEVQLVESGGGLVQPGGSLKLSCAASGFTFNKYAMNWVRQAPGKGLEWVARIRSKYNNYATYYADSVKDRFTISRDDSKNTAYLQMNNLKTEDTAVYYCVRHGNFGNSYISYWAYWGQGTLVTVSSGGGGSGGGGSGGGGSQTVVTQEPSLTVSPGGTVTLTCGSSTGAVTSGNYPNWVQQKPGQAPRGLIGGTKFLAPGTPARFSGSLLGGKAALTLSGVQPEDEAEYYCVLWYSNRWVFGGGTKLTVLGGGGSQRFCTGHFGGLHPCNGHHHHHH

SEQ ID NO: 277 - protein, 550 aa, Artificial Sequence
  Synthetic polypeptide
QRFVTGHFGGLHPANGGGGGSQVQLVESGGGVVQPGRSLRLSCAASGFTFRNYAMHWVRQAPGKGLEWVAVISYSGNNKYYASSVKGRFTISRDNSKNTLYLQLNSLRAEDTAVYYCAREFYYDSTGYDYSTPGDYWGQGTLVTVSSGGGGSGGGGSGGGGSDIQMTQSPSSLSASVGDRVTITCQASQDISNYLNWYQQKPGKAPKLLIYDASNLETGVPSRFSGSGSGTDFTFTISSLQPEDIATYYCQQYDNLPTFGQGTRLEIKSGGGGSEVQLVESGGGLVQPGGSLKLSCAASGFTFNKYAMNWVRQAPGKGLEWVARIRSKYNNYATYYADSVKDRFTISRDDSKNTAYLQMNNLKTEDTAVYYCVRHGNFGNSYISYWAYWGQGTLVTVSSGGGGSGGGGSGGGGSQTVVTQEPSLTVSPGGTVTLTCGSSTGAVTSGNYPNWVQQKPGQAPRGLIGGTKFLAPGTPARFSGSLLGGKAALTLSGVQPEDEAEYYCVLWYSNRWVFGGGTKLTVLGGGGSQRFCTGHFGGLHPCNGHHHHHH

SEQ ID NO: 278 - protein, 551 aa, Artificial Sequence
  Synthetic polypeptide
QRFVTGHFGGLHPANGGGGGSQVQLVESGGGVVQPGRSLRLSCVASGFTFRNYAMHWVRQAPGKGLEWVAVISYSGNNKYYASSVKGRFTISRDNSKNTLYLQLNSLRAEDTAVYYCAREFYYDSTGYDYSTPGDYWGQGTLVTVSSGGGGSGGGGSGGGGSDIQMTQSPSSLSASVGDRVTITCRASQSISSYLNWYQQKPGKAPKLLIYDASSLQSGVPSRFSGSGSGTEFTLTISSLQAEDVAVYYCQQYYSTPLTFGGGTKVDIKSGGGGSEVQLVESGGGLVQPGGSLKLSCAASGFTFNKYAMNWVRQAPGKGLEWVARIRSKYNNYATYYADSVKDRFTISRDDSKNTAYLQMNNLKTEDTAVYYCVRHGNFGNSYISYWAYWGQGTLVTVSSGGGGSGGGGSGGGGSQTVVTQEPSLTVSPGGTVTLTCGSSTGAVTSGNYPNWVQQKPGQAPRGLIGGTKFLAPGTPARFSGSLLGGKAALTLSGVQPEDEAEYYCVLWYSNRWVFGGGTKLTVLGGGGSQRFCTGHFGGLHPCNGHHHHHH

SEQ ID NO: 279 - protein, 551 aa, Artificial Sequence
  Synthetic polypeptide
QRFVTGHFGGLHPANGGGGGSQVQLVESGGGVVQPGRSLRLSCAASGFTFRNYAMHWVRQAPGKGLEWVAGISYSGTNKYYASSVKGRFTISRDNSKNTLYLQLNSLRAEDTAVYYCAREFYYDSTGYDYSTPGDYWGQGTLVTVSSGGGGSGGGGSGGGGSDIQMTQSPSSLSASVGDRVTITCQASQDISNYLNWYQQKPGKAPKLLIYDASNLETGVPSRFSGSGSGTEFTLTISSLQPEDIATYYCQQYDNLPLTFGGGTKVDIKSGGGGSEVQLVESGGGLVQPGGSLKLSCAASGFTFNKYAMNWVRQAPGKGLEWVARIRSKYNNYATYYADSVKDRFTISRDDSKNTAYLQMNNLKTEDTAVYYCVRHGNFGNSYISYWAYWGQGTLVTVSSGGGGSGGGGSGGGGSQTVVTQEPSLTVSPGGTVTLTCGSSTGAVTSGNYPNWVQQKPGQAPRGLIGGTKFLAPGTPARFSGSLLGGKAALTLSGVQPEDEAEYYCVLWYSNRWVFGGGTKLTVLGGGGSQRFCTGHFGGLHPCNGHHHHHH

SEQ ID NO: 280 - protein, 551 aa, Artificial Sequence
  Synthetic polypeptide
QRFVTGHFGGLHPANGGGGGSQVQLVESGGGVVQPGRSLRLSCVASGFTFRNYAMHWVRQAPGKGLEWVAVISYSGNNKYYASSVKGRFTISRDNSKNTLFLQLNSLRAEDTAVYYCAREFYYDSTGYDYSTPGNYWGQGTLVTVSSGGGGSGGGGSGGGGSDIQMTQSPSSLSASVGDRVTITCQASQDISNYLNWYQQKPGKAPKLLIYDASNLETGVPSRFSGSGSGTDFTFTISSLQPEDIATYYCQQYVNLPLTFGGGTKLEIKSGGGGSEVQLVESGGGLVQPGGSLKLSCAASGFTFNKYAMNWVRQAPGKGLEWVARIRSKYNNYATYYADSVKDRFTISRDDSKNTAYLQMNNLKTEDTAVYYCVRHGNFGNSYISYWAYWGQGTLVTVSSGGGGSGGGGSGGGGSQTVVTQEPSLTVSPGGTVTLTCGSSTGAVTSGNYPNWVQQKPGQAPRGLIGGTKFLAPGTPARFSGSLLGGKAALTLSGVQPEDEAEYYCVLWYSNRWVFGGGTKLTVLGGGGSQRFCTGHFGGLHPCNGHHHHHH

SEQ ID NO: 281 - protein, 548 aa, Artificial Sequence
  Synthetic polypeptide
QRFVTGHFGGLHPANGGGGGSQVQLVESGGGVVQPGRSLRLSCAASGFTFSSYGMQWVRQAPGKGLEWVAVIWYSGSNKYYASSVKGRFTISRDNSKNTLYLQMNSLRAEDTAVYYCARDGYPIFYRYYGMDVWGQGTTVTVSSGGGGSGGGGSGGGGSDIQMTQSPSSLSASVGDRVTITCRASQGISNYLAWYQQKPGKVPKLLIYAASTLQSGVPSRFSGSGSGTDFTLTISSLQPEDVATYYCQKYNSAPLTFGGGTKVEIKSGGGGSEVQLVESGGGLVQPGGSLKLSCAASGFTFNKYAMNWVRQAPGKGLEWVARIRSKYNNYATYYADSVKDRFTISRDDSKNTAYLQMNNLKTEDTAVYYCVRHGNFGNSYISYWAYWGQGTLVTVSSGGGGSGGGGSGGGGSQTVVTQEPSLTVSPGGTVTLTCGSSTGAVTSGNYPNWVQQKPGQAPRGLIGGTKFLAPGTPARFSGSLLGGKAALTLSGVQPEDEAEYYCVLWYSNRWVFGGGTKLTVLGGGGSQRFCTGHFGGLHPCNGHHHHHH

SEQ ID NO: 282 - protein, 549 aa, Artificial Sequence
  Synthetic polypeptide
QRFVTGHFGGLHPANGGGGGSQVQLVESGGGVVQPGRSLRLSCAASGFTFSSYGMHWVRQAPGKGLEWVAVISYSGSNKYYASSVKGRFTISRDNSKNTLYLQMNSLRAEDTAVYYCARDGYPIFYRYYGMDVWGQGTTVTVSSGGGGSGGGGSGGGGSEIVLTQSPGTLSLSPGERATLSCRASQSVSSSYLAWYQQKPGQAPRLLIYGASSRATGIPDRFSGSGSGTDFTLTISRLEPEDLAVYYCQQYGTSPLTFGGGTKLEIKSGGGGSEVQLVESGGGLVQPGGSLKLSCAASGFTFNKYAMNWVRQAPGKGLEWVARIRSKYNNYATYYADSVKDRFTISRDDSKNTAYLQMNNLKTEDTAVYYCVRHGNFGNSYISYWAYWGQGTLVTVSSGGGGSGGGGSGGGGSQTVVTQEPSLTVSPGGTVTLTCGSSTGAVTSGNYPNWVQQKPGQAPRGLIGGTKFLAPGTPARFSGSLLGGKAALTLSGVQPEDEAEYYCVLWYSNRWVFGGGTKLTVLGGGGSQRFCTGHFGGLHPCNGHHHHHH

SEQ ID NO: 283 - protein, 549 aa, Artificial Sequence
  Synthetic polypeptide
QRFVTGHFGGLHPANGGGGGSQVQLVESGGGVVQPGRSLRLSCAASGFTFSSFGMHWVRQAPGKGLEWVAFIWYSGSNKYYASSVKGRVTISRDNSKNTLYLQMNSLRAEDTAVYYCARDGYPIFYYYYGMDVWGQGTTVTVSSGGGGSGGGGSGGGGSEIVLTQSPGTLSLSPGERATLSCRASQSVSSSYLAWYQQKPGQAPRLLIYGASSRATGIPDRFSGSGSGTDFTLTISRLEPEDFAVYYCQQYGSSPFTFGPGTRLEIKSGGGGSEVQLVESGGGLVQPGGSLKLSCAASGFTFNKYAMNWVRQAPGKGLEWVARIRSKYNNYATYYADSVKDRFTISRDDSKNTAYLQMNNLKTEDTAVYYCVRHGNFGNSYISYWAYWGQGTLVTVSSGGGGSGGGGSGGGGSQTVVTQEPSLTVSPGGTVTLTCGSSTGAVTSGNYPNWVQQKPGQAPRGLIGGTKFLAPGTPARFSGSLLGGKAALTLSGVQPEDEAEYYCVLWYSNRWVFGGGTKLTVLGGGGSQRFCTGHFGGLHPCNGHHHHHH

SEQ ID NO: 284 - protein, 549 aa, Artificial Sequence
  Synthetic polypeptide
QRFVTGHFGGLHPANGGGGGSQVQLVESGGGVVQPGGSLRLSCAASGFTFSSYGMHWVRQAPGKGLEWVAFIWYDGSNKYYADSVKGRFTISRDNSKNTLYLQMNSLRAEDTAVYYCARRAGIIGTIGYYYGMDVWGQGTTVTVSSGGGGSGGGGSGGGGSSYELTQPPSVSVSPGQTASITCSGDRLGEKYTSWYQQRPGQSPLLVIYQDTKRPSGIPERFSGSNSGNTATLTISGTQAMDEADYYCQAWESSTVVFGGGTKLTVLSGGGGSEVQLVESGGGLVQPGGSLKLSCAASGFTFNKYAMNWVRQAPGKGLEWVARIRSKYNNYATYYADSVKDRFTISRDDSKNTAYLQMNNLKTEDTAVYYCVRHGNFGNSYISYWAYWGQGTLVTVSSGGGGSGGGGSGGGGSQTVVTQEPSLTVSPGGTVTLTCGSSTGAVTSGNYPNWVQQKPGQAPRGLIGGTKFLAPGTPARFSGSLLGGKAALTLSGVQPEDEAEYYCVLWYSNRWVFGGGTKLTVLGGGGSQRFVTGHFGGLHPANGHHHHHH

SEQ ID NO: 285 - protein, 546 aa, Artificial Sequence
  Synthetic polypeptide
QRFVTGHFGGLHPANGGGGGSQVQLQESGPGLVKPSQTLSLTCTVSGGSISRGGYYWSWIRQHPGKGLEWIGYIFYRGRTYYNPSLKSRVTISVDTSKNQFSLKLSSVTAADTAVYYCARVNSNYGWFDPWGQGTLVTVSSGGGGSGGGGSGGGGSEIVLTQFPGTLSLSPGERATLSCRASQSVSSSYLAWYQQKPGQAPRLLIYGASSRATGIPDRFSGSGSGTDFTLTISRLEPEDFAVYYCQQYGSSPLTFGGGTKLEIKSGGGGSEVQLVESGGGLVQPGGSLKLSCAASGFTFNKYAMNWVRQAPGKGLEWVARIRSKYNNYATYYADSVKDRFTISRDDSKNTAYLQMNNLKTEDTAVYYCVRHGNFGNSYISYWAYWGQGTLVTVSSGGGGSGGGGSGGGGSQTVVTQEPSLTVSPGGTVTLTCGSSTGAVTSGNYPNWVQQKPGQAPRGLIGGTKFLAPGTPARFSGSLLGGKAALTLSGVQPEDEAEYYCVLWYSNRWVFGGGTKLTVLGGGGSQRFVTGHFGGLHPANGHHHHHH

SEQ ID NO: 286 - protein, 546 aa, Artificial Sequence
  Synthetic polypeptide
QRFVTGHFGGLHPANGGGGGSQVQLQESGPGLVKPSQTLSLTCTVSGGSISSGGYYWSWIRQHPGKGLEWIGYIFYRGRTYYNPSLKSRVTISVDTSKNQFSLKLSSVTAADTAVYYCARVYSNYGWFDPWGQGTLVTVSSGGGGSGGGGSGGGGSEIVLTQSPGTLSLSPGERATLSCRASQSVSSSYLAWYQQKPGQAPRLLIYGTSNRATGIPDRFSGSGSGTDFTLTISRLEPEDFAVYYCQQYGSSPLTFGGGTKLEIKSGGGGSEVQLVESGGGLVQPGGSLKLSCAASGFTFNKYAMNWVRQAPGKGLEWVARIRSKYNNYATYYADSVKDRFTISRDDSKNTAYLQMNNLKTEDTAVYYCVRHGNFGNSYISYWAYWGQGTLVTVSSGGGGSGGGGSGGGGSQTVVTQEPSLTVSPGGTVTLTCGSSTGAVTSGNYPNWVQQKPGQAPRGLIGGTKFLAPGTPARFSGSLLGGKAALTLSGVQPEDEAEYYCVLWYSNRWVFGGGTKLTVLGGGGSQRFVTGHFGGLHPANGHHHHHH

SEQ ID NO: 287 - protein, 546 aa, Artificial Sequence
  Synthetic polypeptide
QRFVTGHFGGLHPANGGGGGSQVQLQESGPGLVKPSQTLSLTCTVSGGSISSGGYYWSWIRQHPGKGLEWIGYIFYSGRTYYNPSLKSRVTISVDTSKNQFSLKLSSVTAADTAVYYCARVYSNYGWFDPWGQGTLVTVSSGGGGSGGGGSGGGGSEIVLTQSPGTLSLSPGERATLSCRASQSVSSSYLAWYQQKPGQAPRLLIYGASSRATGIPDRFSGSGSGTDFTLTISRLEPEDFAVYYCQQYGSSPLTFGGGTKLEIKSGGGGSEVQLVESGGGLVQPGGSLKLSCAASGFTFNKYAMNWVRQAPGKGLEWVARIRSKYNNYATYYADSVKDRFTISRDDSKNTAYLQMNNLKTEDTAVYYCVRHGNFGNSYISYWAYWGQGTLVTVSSGGGGSGGGGSGGGGSQTVVTQEPSLTVSPGGTVTLTCGSSTGAVTSGNYPNWVQQKPGQAPRGLIGGTKFLAPGTPARFSGSLLGGKAALTLSGVQPEDEAEYYCVLWYSNRWVFGGGTKLTVLGGGGSQRFVTGHFGGLHPANGHHHHHH

SEQ ID NO: 288 - protein, 546 aa, Artificial Sequence
  Synthetic polypeptide
QRFVTGHFGGLHPANGGGGGSQVQLQESGPGLVKPSQTLSLTCTVSGGSISSGGYYWSWIRQHPGKGLEWIGYIFYSGRTYYNPSLKSRVTISVDTSKNQFSLKLRSVTAADTAVYYCARVYSNYGWFDPWGQGTLVTVSSGGGGSGGGGSGGGGSEIVLTQSPGTLSLSPGERATLSCRASQSVSSSYLAWYQQKPGQAPRLLIYGASSRATGIPDRFSGSGSGTDFTLTISRLEPEDFAVYYCQQYGSSPLTFGGGTKLEIKSGGGGSEVQLVESGGGLVQPGGSLKLSCAASGFTFNKYAMNWVRQAPGKGLEWVARIRSKYNNYATYYADSVKDRFTISRDDSKNTAYLQMNNLKTEDTAVYYCVRHGNFGNSYISYWAYWGQGTLVTVSSGGGGSGGGGSGGGGSQTVVTQEPSLTVSPGGTVTLTCGSSTGAVTSGNYPNWVQQKPGQAPRGLIGGTKFLAPGTPARFSGSLLGGKAALTLSGVQPEDEAEYYCVLWYSNRWVFGGGTKLTVLGGGGSQRFVTGHFGGLHPANGHHHHHH

SEQ ID NO: 289 - protein, 546 aa, Artificial Sequence
  Synthetic polypeptide
QRFVTGHFGGLHPANGGGGGSQVQLQESGPGLVKPSQTLSLTCTVSGGSISSGGYYWSWIRQHPGKGLEWIGYIYYSGSTFYNPSLRSRVTISVDTSKNQFSLKLSSVTAADTAVYYCARDSSSSRALDYWGQGTLVTVSSGGGGSGGGGSGGGGSEIVLTQSPGTLSLSPGERATLSCRASQSVSSSYLAWYQQKPGQAPRLLIYGASSRATGIPDRFSGSGSGTDFTLTISRLEPEDFAVYYCQQYDSSPRTFGQGTKLEIKSGGGGSEVQLVESGGGLVQPGGSLKLSCAASGFTFNKYAMNWVRQAPGKGLEWVARIRSKYNNYATYYADSVKDRFTISRDDSKNTAYLQMNNLKTEDTAVYYCVRHGNFGNSYISYWAYWGQGTLVTVSSGGGGSGGGGSGGGGSQTVVTQEPSLTVSPGGTVTLTCGSSTGAVTSGNYPNWVQQKPGQAPRGLIGGTKFLAPGTPARFSGSLLGGKAALTLSGVQPEDEAEYYCVLWYSNRWVFGGGTKLTVLGGGGSQRFVTGHFGGLHPANGHHHHHH

SEQ ID NO: 290 - protein, 546 aa, Artificial Sequence
  Synthetic polypeptide
QRFVTGHFGGLHPANGGGGGSQVQLQESGPGLVKPSQTLSLTCTVSGGSISSGGYYWSWIRQHPGKGLEWIGYIYYRGRTYYNPSLKSRVTISVDTSKNQFSLKLSSVTAADTAVYYCARVYSNYGWFDPWGQGTLVTVSSGGGGSGGGGSGGGGSEIVLTQSPGTLSLSPGERATLSCRASQSVSSSYLAWYQQKPGQAPRLLIYGASSRATGIPDRFSGSGSGTDFTLTISRLEPEDFAVYYCQQYGSSPLTFGGGTKLEIKSGGGGSEVQLVESGGGLVQPGGSLKLSCAASGFTFNKYAMNWVRQAPGKGLEWVARIRSKYNNYATYYADSVKDRFTISRDDSKNTAYLQMNNLKTEDTAVYYCVRHGNFGNSYISYWAYWGQGTLVTVSSGGGGSGGGGSGGGGSQTVVTQEPSLTVSPGGTVTLTCGSSTGAVTSGNYPNWVQQKPGQAPRGLIGGTKFLAPGTPARFSGSLLGGKAALTLSGVQPEDEAEYYCVLWYSNRWVFGGGTKLTVLGGGGSQRFVTGHFGGLHPANGHHHHHH

SEQ ID NO: 291 - protein, 545 aa, Artificial Sequence
  Synthetic polypeptide
QRFVTGHFGGLHPANGGGGGSQVQLQESGPGLVKPSETLSLTCTVSGGSISSGGYYWSWIRQHPGKGLEWIGYIFYRGRTYYNPSLKSRVTISVDTSKNQFSLKLSSVTAADTAVYYCARVYSNYGWFDPWGQGTLVTVSSGGGGSGGGGSGGGGSEIVLTQSPGTLSLSPGERATLSCRASQSVSSSYLAWYQQKPGQAPRLLIYGASSRATGIPDRFSGSGSGTDFTLTISRLEPEDFAVYYCQQYGSSPTFGGGTKVEIKSGGGGSEVQLVESGGGLVQPGGSLKLSCAASGFTFNKYAMNWVRQAPGKGLEWVARIRSKYNNYATYYADSVKDRFTISRDDSKNTAYLQMNNLKTEDTAVYYCVRHGNFGNSYISYWAYWGQGTLVTVSSGGGGSGGGGSGGGGSQTVVTQEPSLTVSPGGTVTLTCGSSTGAVTSGNYPNWVQQKPGQAPRGLIGGTKFLAPGTPARFSGSLLGGKAALTLSGVQPEDEAEYYCVLWYSNRWVFGGGTKLTVLGGGGSQRFVTGHFGGLHPANGHHHHHH

SEQ ID NO: 292 - protein, 546 aa, Artificial Sequence
  Synthetic polypeptide
QRFVTGHFGGLHPANGGGGGSQVQLQESGPGLVKPSQTLSLTCTVSGGSISSGGYYWSWIRQHPGKGLEWIGYIFYRGRTYYNPSLKSRVTISVDTSKNQFSLKLSSVTAADTAVYYCARVYSNYGWFDPWGQGTLVTVSSGGGGSGGGGSGGGGSEIVLTQSPGTLSLSPGERATLSCRASQSVSSSYLAWYQQKPGQAPRLLIYGASSRATGIPDRFSGSGSGTDFTLTISRLEPEDFAVYYCQQYGSSPLTFGGGTKVEIKSGGGGSEVQLVESGGGLVQPGGSLKLSCAASGFTFNKYAMNWVRQAPGKGLEWVARIRSKYNNYATYYADSVKDRFTISRDDSKNTAYLQMNNLKTEDTAVYYCVRHGNFGNSYISYWAYWGQGTLVTVSSGGGGSGGGGSGGGGSQTVVTQEPSLTVSPGGTVTLTCGSSTGAVTSGNYPNWVQQKPGQAPRGLIGGTKFLAPGTPARFSGSLLGGKAALTLSGVQPEDEAEYYCVLWYSNRWVFGGGTKLTVLGGGGSQRFVTGHFGGLHPANGHHHHHH

SEQ ID NO: 293 - protein, 545 aa, Artificial Sequence
  Synthetic polypeptide
QRFVTGHFGGLHPANGGGGGSQVQLQESGPGLVKPSQTLSLTCTVSGGSISSGGYYWSWIRQHPGKGLEWIGYIYYRGRTYYNPSLKSRVTISVDTSKNQFSLKLSSVTAADTAVYYCARVYSNYGWFDPWGQGTLVTVSSGGGGSGGGGSGGGGSEIVLTQSPGTLSLSPGERATLSCRASQSVSSSYLAWYQQKPGQAPRLLIYGASSRATGIPDRFSGSGSGTDFTLTISRLEPEDFAVYYCQQYGSSPTFGPGTKVEIKSGGGGSEVQLVESGGGLVQPGGSLKLSCAASGFTFNKYAMNWVRQAPGKGLEWVARIRSKYNNYATYYADSVKDRFTISRDDSKNTAYLQMNNLKTEDTAVYYCVRHGNFGNSYISYWAYWGQGTLVTVSSGGGGSGGGGSGGGGSQTVVTQEPSLTVSPGGTVTLTCGSSTGAVTSGNYPNWVQQKPGQAPRGLIGGTKFLAPGTPARFSGSLLGGKAALTLSGVQPEDEAEYYCVLWYSNRWVFGGGTKLTVLGGGGSQRFVTGHFGGLHPANGHHHHHH

SEQ ID NO: 294 - protein, 545 aa, Artificial Sequence
  Synthetic polypeptide
QRFVTGHFGGLHPANGGGGGSQVQLQESGPGLVKPSQTLSLTCTVSGGSISSGGYYWSWIRQHPGKGLEWIGYIYYRGRTYYNPSLKSRVTISVDTSKNQFSLKLSSVTAADTAVYYCARVYSNYGWFDPWGQGTLVTVSSGGGGSGGGGSGGGGSEIVLTQSPGTLSLSPGERATLSCRASQSVSSSYLAWYQQKPGQAPRLLIYGASSRATGIPDRFSGSGSGTDFTLTISRLEPEDFAVYYCQQYGSSPTFGGGTKVEIKSGGGGSEVQLVESGGGLVQPGGSLKLSCAASGFTFNKYAMNWVRQAPGKGLEWVARIRSKYNNYATYYADSVKDRFTISRDDSKNTAYLQMNNLKTEDTAVYYCVRHGNFGNSYISYWAYWGQGTLVTVSSGGGGSGGGGSGGGGSQTVVTQEPSLTVSPGGTVTLTCGSSTGAVTSGNYPNWVQQKPGQAPRGLIGGTKFLAPGTPARFSGSLLGGKAALTLSGVQPEDEAEYYCVLWYSNRWVFGGGTKLTVLGGGGSQRFVTGHFGGLHPANGHHHHHH

SEQ ID NO: 295 - protein, 545 aa, Artificial Sequence
  Synthetic polypeptide
QRFVTGHFGGLHPANGGGGGSQVQLQESGPGLVKPSQTLSLTCTISGGSISSGGYYWSWIRQHPGKGLEWIGYIFYSGRTYYNPSLKSRVTISVDTSKNQFSLKLTSVTAADTAVYYCARVNSNYGWFDPWGQGTLVTVSSGGGGSGGGGSGGGGSEIVLTQSPGTLSLSPGERATLSCRASQSVSSSYLAWYQQKPGQAPRLLIYGASSRATGIPDRFSGSGSGTDFTLTISRLEPEDFAVYYCQQYGSSPTFGGGTKVEIKSGGGGSEVQLVESGGGLVQPGGSLKLSCAASGFTFNKYAMNWVRQAPGKGLEWVARIRSKYNNYATYYADSVKDRFTISRDDSKNTAYLQMNNLKTEDTAVYYCVRHGNFGNSYISYWAYWGQGTLVTVSSGGGGSGGGGSGGGGSQTVVTQEPSLTVSPGGTVTLTCGSSTGAVTSGNYPNWVQQKPGQAPRGLIGGTKFLAPGTPARFSGSLLGGKAALTLSGVQPEDEAEYYCVLWYSNRWVFGGGTKLTVLGGGGSQRFVTGHFGGLHPANGHHHHHH

SEQ ID NO: 296 - protein, 546 aa, Artificial Sequence
  Synthetic polypeptide
QRFVTGHFGGLHPANGGGGGSQVQLQESGPGLVKPSQTLSLTCTVSGGSISSGGYYWSWIRQHPGKGLDWIGYIFYRGRTYYNPSLKSRVTISVDTSKNQFSLKLSSVTAADTAVYYCARVNSNYGWFDPWGQGTLVTVSSGGGGSGGGGSGGGGSEIVLTQSPGTLSLSPGERATLSCRASQSVSSSYLAWYQQKPGQAPRLLIYGASSRATGIPDRFSGSGSGTDFTLTISRLEPEDFAVYYCQQYGSSPLTFGGGTKVEIKSGGGGSEVQLVESGGGLVQPGGSLKLSCAASGFTFNKYAMNWVRQAPGKGLEWVARIRSKYNNYATYYADSVKDRFTISRDDSKNTAYLQMNNLKTEDTAVYYCVRHGNFGNSYISYWAYWGQGTLVTVSSGGGGSGGGGSGGGGSQTVVTQEPSLTVSPGGTVTLTCGSSTGAVTSGNYPNWVQQKPGQAPRGLIGGTKFLAPGTPARFSGSLLGGKAALTLSGVQPEDEAEYYCVLWYSNRWVFGGGTKLTVLGGGGSQRFVTGHFGGLHPANGHHHHHH

SEQ ID NO: 297 - protein, 545 aa, Artificial Sequence
  Synthetic polypeptide
QRFVTGHFGGLHPANGGGGGSQVQLQESGPGLVKPSQTLSLTCTVSGGSISSGGYYWSWIRQHPGKGLEWIGYIYYRGRTYYNPSLKSRVTISVDTSKNQFSLKLSSVTAADTAVYYCARVYSNYGWFDPWGQGTLVTVSSGGGGSGGGGSGGGGSEIVLTQSPGTLSLSPGERATLSCRASQSVSSSYLAWYQQKPGQAPRLLIYGASTRATGIPDRFSGSGSGTDFTLTISRLEPEDFAVYYCQQYGSSPSFGQGTKVEIKSGGGGSEVQLVESGGGLVQPGGSLKLSCAASGFTFNKYAMNWVRQAPGKGLEWVARIRSKYNNYATYYADSVKDRFTISRDDSKNTAYLQMNNLKTEDTAVYYCVRHGNFGNSYISYWAYWGQGTLVTVSSGGGGSGGGGSGGGGSQTVVTQEPSLTVSPGGTVTLTCGSSTGAVTSGNYPNWVQQKPGQAPRGLIGGTKFLAPGTPARFSGSLLGGKAALTLSGVQPEDEAEYYCVLWYSNRWVFGGGTKLTVLGGGGSQRFVTGHFGGLHPANGHHHHHH

SEQ ID NO: 298 - protein, 546 aa, Artificial Sequence
  Synthetic polypeptide
QRFVTGHFGGLHPANGGGGGSQVQLQESGPGLVRPSQTLSLTCTVSGGSISSGGYYWSWIRQHPGKGLEWIGYIYYRGRTYYNPSLKSRVTISVDTSKNQFSLKLSSVTAADTAVYYCARVYSNYGWFDPWGQGTLVTVSSGGGGSGGGGSGGGGSEIVLTQSPGTLSLSPGERATLSCRASQSVSSSYLAWYQQKPGQAPRLLIYGASSRATGIPDRFSGSGSGTDFTLTISRLEPEDFAVYYCQQYDTSPLTFGGGTKVEIKSGGGGSEVQLVESGGGLVQPGGSLKLSCAASGFTFNKYAMNWVRQAPGKGLEWVARIRSKYNNYATYYADSVKDRFTISRDDSKNTAYLQMNNLKTEDTAVYYCVRHGNFGNSYISYWAYWGQGTLVTVSSGGGGSGGGGSGGGGSQTVVTQEPSLTVSPGGTVTLTCGSSTGAVTSGNYPNWVQQKPGQAPRGLIGGTKFLAPGTPARFSGSLLGGKAALTLSGVQPEDEAEYYCVLWYSNRWVFGGGTKLTVLGGGGSQRFVTGHFGGLHPANGHHHHHH

SEQ ID NO: 299 - protein, 545 aa, Artificial Sequence; identical to SEQ ID NO: 294
  Synthetic polypeptide

SEQ ID NO: 300 - protein, 546 aa, Artificial Sequence
  Synthetic polypeptide
QRFVTGHFGGLHPANGGGGGSQVQLQESGPGLVKPSQTLSLTCTVSGGSISSGGYYWSWIRQHPGKGLEWIGYIYYRGRTYYNPSLKSRVTISVDTSKNQFSLKLSSVTAADTAVYYCARVYSNYGWFDPWGQGTLVTVSSGGGGSGGGGSGGGGSEIVLTQSPGTLSLSPGERATLSCRASQSVSSSYLAWYQQKPGQAPRLLIYGASSRATGIPDRFSGSGSGTDFTLTISRLEPEDFAVYYCQQYGSSPLTFGGGTKVEIKSGGGGSEVQLVESGGGLVQPGGSLKLSCAASGFTFNKYAMNWVRQAPGKGLEWVARIRSKYNNYATYYADSVKDRFTISRDDSKNTAYLQMNNLKTEDTAVYYCVRHGNFGNSYISYWAYWGQGTLVTVSSGGGGSGGGGSGGGGSQTVVTQEPSLTVSPGGTVTLTCGSSTGAVTSGNYPNWVQQKPGQAPRGLIGGTKFLAPGTPARFSGSLLGGKAALTLSGVQPEDEAEYYCVLWYSNRWVFGGGTKLTVLGGGGSQRFVTGHFGGLHPANGHHHHHH

SEQ ID NO: 301 - protein, 546 aa, Artificial Sequence
  Synthetic polypeptide
QRFVTGHFGGLHPANGGGGGSQVQLQESGPGLVKPSQTLSLTCTVSGGSISSGGYYWSWVRQHPGKGLEWIGYIFYSGRTYYNPSLKSRVIISVDTSKNQFSLKLSSVTAADTAVYYCARVYSNYGWFDPWGQGTLVTVSSGGGGSGGGGSGGGGSEIVLTQSPGTLSLSPGERATLSCRASQSVSSSYLAWYQQKPGQAPRLLIYGASSRATGIPDRFSGSGSGTDFTLTISRLEPEDFAVYYCQQYGSSPLTFGGGTKVEIKSGGGGSEVQLVESGGGLVQPGGSLKLSCAASGFTFNKYAMNWVRQAPGKGLEWVARIRSKYNNYATYYADSVKDRFTISRDDSKNTAYLQMNNLKTEDTAVYYCVRHGNFGNSYISYWAYWGQGTLVTVSSGGGGSGGGGSGGGGSQTVVTQEPSLTVSPGGTVTLTCGSSTGAVTSGNYPNWVQQKPGQAPRGLIGGTKFLAPGTPARFSGSLLGGKAALTLSGVQPEDEAEYYCVLWYSNRWVFGGGTKLTVLGGGGSQRFVTGHFGGLHPANGHHHHHH

SEQ ID NO: 302 - protein, 546 aa, Artificial Sequence
  Synthetic polypeptide
QRFVTGHFGGLHPANGGGGGSQVQLQESGPGLVKPSQTLSLTCTVSGGSISSGGYYWSWIRQHPGKGLEWIGYIFYSGRTYYNPSLKSRVTISVDTSKNQFSLKLSSVTAADTAVYYCARVYSNYGWFDPWGQGTLVTVSSGGGGSGGGGSGGGGSEIVLTQSPGTLSLSPGERATLSCRASQSVSSSYLAWYQQKPGQAPRLLIYGASSRATGIPDRFSGSGSGTDFTLTISRLEPEDFAVYYCQQYGSSPLTFGGGTKVEIKSGGGGSEVQLVESGGGLVQPGGSLKLSCAASGFTFNKYAMNWVRQAPGKGLEWVARIRSKYNNYATYYADSVKDRFTISRDDSKNTAYLQMNNLKTEDTAVYYCVRHGNFGNSYISYWAYWGQGTLVTVSSGGGGSGGGGSGGGGSQTVVTQEPSLTVSPGGTVTLTCGSSTGAVTSGNYPNWVQQKPGQAPRGLIGGTKFLAPGTPARFSGSLLGGKAALTLSGVQPEDEAEYYCVLWYSNRWVFGGGTKLTVLGGGGSQRFVTGHFGGLHPANGHHHHHH

SEQ ID NO: 303 - protein, 546 aa, Artificial Sequence
  Synthetic polypeptide
QRFVTGHFGGLHPANGGGGGSQVQLQESGPGLVKPSQTLSLTCTVSGGSISSGGYYWSWIRQHPGKGLEWIGYIFYSGRTYYNPSLKSRVSISVDTSKNQFSLKLSSVTAADTAVYYCARVYSNYGWFDPWGQGTLVTVSSGGGGSGGGGSGGGGSEIVLTQSPGTLSLSPGERATLSCRASQSVSSSYLAWYQQKPGQAPRLLIYGASSRATGIPDRFSGSGSGTDFTLTISRLEPEDFAVYYCQQYGSSPLTFGGGTKVEIKSGGGGSEVQLVESGGGLVQPGGSLKLSCAASGFTFNKYAMNWVRQAPGKGLEWVARIRSKYNNYATYYADSVKDRFTISRDDSKNTAYLQMNNLKTEDTAVYYCVRHGNFGNSYISYWAYWGQGTLVTVSSGGGGSGGGGSGGGGSQTVVTQEPSLTVSPGGTVTLTCGSSTGAVTSGNYPNWVQQKPGQAPRGLIGGTKFLAPGTPARFSGSLLGGKAALTLSGVQPEDEAEYYCVLWYSNRWVFGGGTKLTVLGGGGSQRFVTGHFGGLHPANGHHHHHH

SEQ ID NO: 304 - protein, 546 aa, Artificial Sequence
  Synthetic polypeptide
QRFVTGHFGGLHPANGGGGGSQVQLQESGPGLVKPSETLSLTCTVSGGSVSSGGYYWSWIRQPPGKGLEWIGYIYYRGRTYYNPSLKSRVTISVDTSKNQFSLKLSSVTAADTAVYYCARVYSNYGWFDPWGQGTLVTVSSGGGGSGGGGSGGGGSEIVLTQSPGTLSLSPGERATLSCRASQSVSSSYLAWYQQKPGQAPRLLIYGASSRATGIPDRFSGSGSGTDFTLTISRLEPEDFAVYYCQQYGSSPLTFGGGTKVEIKSGGGGSEVQLVESGGGLVQPGGSLKLSCAASGFTFNKYAMNWVRQAPGKGLEWVARIRSKYNNYATYYADSVKDRFTISRDDSKNTAYLQMNNLKTEDTAVYYCVRHGNFGNSYISYWAYWGQGTLVTVSSGGGGSGGGGSGGGGSQTVVTQEPSLTVSPGGTVTLTCGSSTGAVTSGNYPNWVQQKPGQAPRGLIGGTKFLAPGTPARFSGSLLGGKAALTLSGVQPEDEAEYYCVLWYSNRWVFGGGTKLTVLGGGGSQRFVTGHFGGLHPANGHHHHHH

SEQ ID NO: 305 - protein, 545 aa, Artificial Sequence
  Synthetic polypeptide
QRFVTGHFGGLHPANGGGGGSQVQLQESGPGLVKPSQTLSLTCTVSGGSISSGGYYWSWIRQHPGKGLEWIGYIYYRGRTYYNPSLKSRVTISVDTSKNQFSLKLSSVTAADTAVYYCARVYSNYGWFDPWGQGTLVTVSSGGGGSGGGGSGGGGSEIVLTQSPGTLSLSPGERATLSCRASQSVSSSYLAWYQQKPGQAPRLLIYGASSRATGIPDRFSGSGSGTDFTLTISRLEPEDFAVYYCQQYGSSPTFGQGTRLEIKSGGGGSEVQLVESGGGLVQPGGSLKLSCAASGFTFNKYAMNWVRQAPGKGLEWVARIRSKYNNYATYYADSVKDRFTISRDDSKNTAYLQMNNLKTEDTAVYYCVRHGNFGNSYISYWAYWGQGTLVTVSSGGGGSGGGGSGGGGSQTVVTQEPSLTVSPGGTVTLTCGSSTGAVTSGNYPNWVQQKPGQAPRGLIGGTKFLAPGTPARFSGSLLGGKAALTLSGVQPEDEAEYYCVLWYSNRWVFGGGTKLTVLGGGGSQRFVTGHFGGLHPANGHHHHHH

SEQ ID NO: 306 - protein, 546 aa, Artificial Sequence
  Synthetic polypeptide
QRFVTGHFGGLHPANGGGGGSQVQLQESGPGLVKPSQTLSLTCTVSGGSISSGGYYWSWIRQHPGKGLEWIGYIFYSGKTYYNPSLKSRVSISVDTSKNQFSLKLSSVTAADTAVYYCARVYSNYGWFDPWGQGTLVTVSSGGGGSGGGGSGGGGSEIVLTQSPGTLSLSPGERATLSCRASQSVSSSYLAWYQQKPGQAPRLLIYGASSRATGIPDRFSGSGSGTDFTLTISRLEPEDFAVYYCQQYGSSPITFGQGTRLEIKSGGGGSEVQLVESGGGLVQPGGSLKLSCAASGFTFNKYAMNWVRQAPGKGLEWVARIRSKYNNYATYYADSVKDRFTISRDDSKNTAYLQMNNLKTEDTAVYYCVRHGNFGNSYISYWAYWGQGTLVTVSSGGGGSGGGGSGGGGSQTVVTQEPSLTVSPGGTVTLTCGSSTGAVTSGNYPNWVQQKPGQAPRGLIGGTKFLAPGTPARFSGSLLGGKAALTLSGVQPEDEAEYYCVLWYSNRWVFGGGTKLTVLGGGGSQRFVTGHFGGLHPANGHHHHHH

SEQ ID NO: 307 - protein, 551 aa, Artificial Sequence
  Synthetic polypeptide
QRFVTGHFGGLHPANGGGGGSQVQLQESGPGLVKPSETLSLTCTVSGGSISSYYWSWIRQPPGKGLEWIGYIYYSGSTNYNPSLKSRVTMSIDTSKNQFSLKLISVTAADTAVYYCARDQRRIVAAGGYYYGMDVWGQGTTVTVSSGGGGSGGGGSGGGGSEIVLTQSPGTLSLSPGERATLSCRASQSVSSSYLAWYQQKPGQAPRLLIYGASTRATGIPARFSGSGSGTDFTLTISRLEPEDFAVYYCQQYGSSPFTFGPGTKVDIKSGGGGSEVQLVESGGGLVQPGGSLKLSCAASGFTFNKYAMNWVRQAPGKGLEWVARIRSKYNNYATYYADSVKDRFTISRDDSKNTAYLQMNNLKTEDTAVYYCVRHGNFGNSYISYWAYWGQGTLVTVSSGGGGSGGGGSGGGGSQTVVTQEPSLTVSPGGTVTLTCGSSTGAVTSGNYPNWVQQKPGQAPRGLIGGTKFLAPGTPARFSGSLLGGKAALTLSGVQPEDEAEYYCVLWYSNRWVFGGGTKLTVLGGGGSQRFVTGHFGGLHPANGHHHHHH

SEQ ID NO: 308 - protein, 545 aa, Artificial Sequence
  Synthetic polypeptide
QRFVTGHFGGLHPANGGGGGSQVQLQESGPGLVKPSQTLSLTCTVSGGSISSNDYYWSWIRQHPGKGLEWIGYIYYSGSTFYNPSLKSRGAISVDTSKNQFSLKLTSVTAADTAVYYCARGVYRTGAFDIWGQGTMVTVSSGGGGSGGGGSGGGGSDIQMTQSPSSLSASVGDRVTITCRASQSISSYLNWYQQKPGKAPKSLIYAASSLQSGVPSKFSGSGSGTDFTLTISSLQPEDIATYYCQQSYSTPQAFGGGTKVDIKSGGGGSEVQLVESGGGLVQPGGSLKLSCAASGFTFNKYAMNWVRQAPGKGLEWVARIRSKYNNYATYYADSVKDRFTISRDDSKNTAYLQMNNLKTEDTAVYYCVRHGNFGNSYISYWAYWGQGTLVTVSSGGGGSGGGGSGGGGSQTVVTQEPSLTVSPGGTVTLTCGSSTGAVTSGNYPNWVQQKPGQAPRGLIGGTKFLAPGTPARFSGSLLGGKAALTLSGVQPEDEAEYYCVLWYSNRWVFGGGTKLTVLGGGGSQRFVTGHFGGLHPANGHHHHHH

SEQ ID NO: 309 - protein, 546 aa, Artificial Sequence
  Synthetic polypeptide
QRFVTGHFGGLHPANGGGGGSQVQLVQSGAEVKKPGASVKVSCKASGYTFTYYGISWVRQAPGQGLEWMGWINPYGGETNYAQKLQGRVTMTTDTSTSTAYMELRSLRSDDTAVYYCARGSGGFDYWGQGTLVTVSSGGGGSGGGGSGGGGSDIVMTQTPLSLSVTPGEPASISCRSSQSLLHSNGYNYLDWYLQKPGQSPQLLIYLGSYRASGVPDRFSGSGSGTDFTLKISRVEAEDVGVYYCMQALQTPFTFGPGTKVDIKSGGGGSEVQLVESGGGLVQPGGSLKLSCAASGFTFNKYAMNWVRQAPGKGLEWVARIRSKYNNYATYYADSVKDRFTISRDDSKNTAYLQMNNLKTEDTAVYYCVRHGNFGNSYISYWAYWGQGTLVTVSSGGGGSGGGGSGGGGSQTVVTQEPSLTVSPGGTVTLTCGSSTGAVTSGNYPNWVQQKPGQAPRGLIGGTKFLAPGTPARFSGSLLGGKAALTLSGVQPEDEAEYYCVLWYSNRWVFGGGTKLTVLGGGGSQRFVTGHFGGLHPANGHHHHHH

SEQ ID NO: 310 - protein, 546 aa, Artificial Sequence
  Synthetic polypeptide
QRFVTGHFGGLHPANGGGGGSQVQLVQSGAEVKKPGASVKVSCKASGYTFTYYGISWVRQAPGQGLEWMGWINPYSGATNYAQKLQGRVTMTTDTSTSTAYMELRSLRSDDTAVYYCARGSGGFDYWGQGTLVTVSSGGGGSGGGGSGGGGSDIVMTQTPLSLSVTPGEPASISCRSSQSLLHSNGYNYLDWYLQKPGQSPQLLIYLGSYRASGVPDRFSGSGSGTDFTLKISRVEAEDVGVYYCMQALQTPFTFGPGTKVDIKSGGGGSEVQLVESGGGLVQPGGSLKLSCAASGFTFNKYAMNWVRQAPGKGLEWVARIRSKYNNYATYYADSVKDRFTISRDDSKNTAYLQMNNLKTEDTAVYYCVRHGNFGNSYISYWAYWGQGTLVTVSSGGGGSGGGGSGGGGSQTVVTQEPSLTVSPGGTVTLTCGSSTGAVTSGNYPNWVQQKPGQAPRGLIGGTKFLAPGTPARFSGSLLGGKAALTLSGVQPEDEAEYYCVLWYSNRWVFGGGTKLTVLGGGGSQRFVTGHFGGLHPANGHHHHHH

SEQ ID NO: 311 - protein, 546 aa, Artificial Sequence
  Synthetic polypeptide
QRFVTGHFGGLHPANGGGGGSQVQLVQSGAEVKKPGASVKVSCKASGYTFTYYGISWVRQAPGQGLEWMGWINPYTGKTNYAQKLQGRVTMTTDTSTSTAYMELRSLRSDDTAVYYCARGSGGFDYWGQGTLVTVSSGGGGSGGGGSGGGGSDIVMTQTPLSLSVTPGEPASISCRSSQSLLHSNGYNYLDWYLQKPGQSPQLLIYLGSYRASGVPDRFSGSGSGTDFTLKISRVEAEDVGVYYCMQALQTPFTFGPGTKVDIKSGGGGSEVQLVESGGGLVQPGGSLKLSCAASGFTFNKYAMNWVRQAPGKGLEWVARIRSKYNNYATYYADSVKDRFTISRDDSKNTAYLQMNNLKTEDTAVYYCVRHGNFGNSYISYWAYWGQGTLVTVSSGGGGSGGGGSGGGGSQTVVTQEPSLTVSPGGTVTLTCGSSTGAVTSGNYPNWVQQKPGQAPRGLIGGTKFLAPGTPARFSGSLLGGKAALTLSGVQPEDEAEYYCVLWYSNRWVFGGGTKLTVLGGGGSQRFVTGHFGGLHPANGHHHHHH

SEQ ID NO: 312 - protein, 546 aa, Artificial Sequence
  Synthetic polypeptide
QRFVTGHFGGLHPANGGGGGSQVQLVQSGAEVKKPGASVKVSCKASGYTFTYYGISWVRQAPGQGLEWMGWINPYTGKTNYAQKLQGRVTMTTDTSTSTAYMELRSLRSDDTAVYYCARGSGGFDYWGQGTLVTVSSGGGGSGGGGSGGGGSDIVMTQTPLSLSVTPGEPASISCRSSQSLLHSVGYNYLDWYLQKPGQSPQLLIYLGSYRASGVPDRFSGSGSGTDFTLKISRVEAEDVGVYYCMQALQTPFTFGPGTKVDIKSGGGGSEVQLVESGGGLVQPGGSLKLSCAASGFTFNKYAMNWVRQAPGKGLEWVARIRSKYNNYATYYADSVKDRFTISRDDSKNTAYLQMNNLKTEDTAVYYCVRHGNFGNSYISYWAYWGQGTLVTVSSGGGGSGGGGSGGGGSQTVVTQEPSLTVSPGGTVTLTCGSSTGAVTSGNYPNWVQQKPGQAPRGLIGGTKFLAPGTPARFSGSLLGGKAALTLSGVQPEDEAEYYCVLWYSNRWVFGGGTKLTVLGGGGSQRFVTGHFGGLHPANGHHHHHH

SEQ ID NO: 313 - protein, 546 aa, Artificial Sequence
  Synthetic polypeptide
QRFVTGHFGGLHPANGGGGGSQVQLVQSGAEVKKPGASVKVSCKASGYTFTSYGISWVRQAPGQGLEWMGWINPYTGNRNYAQKVQDRVTMTTDTSTNTAYMELSSLRSDDTAVYYCARGSGGFDYWGQGTLVTVSSGGGGSGGGGSGGGGSDIVMTQSPLSLPVTLGQPASISCRSSQSLLHSVGYNYLDWYLQKPGQSPQLLIYLGSNRASGVPDRFSGSGSGTDFTLKISRVEAEDVGVYYCMQALQTPFTFGPGTKLEIKSGGGGSEVQLVESGGGLVQPGGSLKLSCAASGFTFNKYAMNWVRQAPGKGLEWVARIRSKYNNYATYYADSVKDRFTISRDDSKNTAYLQMNNLKTEDTAVYYCVRHGNFGNSYISYWAYWGQGTLVTVSSGGGGSGGGGSGGGGSQTVVTQEPSLTVSPGGTVTLTCGSSTGAVTSGNYPNWVQQKPGQAPRGLIGGTKFLAPGTPARFSGSLLGGKAALTLSGVQPEDEAEYYCVLWYSNRWVFGGGTKLTVLGGGGSQRFVTGHFGGLHPANGHHHHHH

SEQ ID NO: 314 - protein, 546 aa, Artificial Sequence
  Synthetic polypeptide
QRFVTGHFGGLHPANGGGGGSQVQLVQSGAEVKKPGASVKVSCKASGYTFTYYGISWVRQAPGQGLEWMGWINPYTGKTNYAQKLQDRVTMTTDTSTNTAYMELRSLRSDDTAVYYCARGSGGFDYWGQGTLVTVSSGGGGSGGGGSGGGGSDIVMTQTPLSLPVTPGEPASISCRSSQSLLHSVGYNYLDWYLQKPGQSPQLLIYLGSNRASGVPDRFSGSGSGTDFTLKISRVEAEDVGVYYCMQALQTPFTFGPGTKVDIKSGGGGSEVQLVESGGGLVQPGGSLKLSCAASGFTFNKYAMNWVRQAPGKGLEWVARIRSKYNNYATYYADSVKDRFTISRDDSKNTAYLQMNNLKTEDTAVYYCVRHGNFGNSYISYWAYWGQGTLVTVSSGGGGSGGGGSGGGGSQTVVTQEPSLTVSPGGTVTLTCGSSTGAVTSGNYPNWVQQKPGQAPRGLIGGTKFLAPGTPARFSGSLLGGKAALTLSGVQPEDEAEYYCVLWYSNRWVFGGGTKLTVLGGGGSQRFVTGHFGGLHPANGHHHHHH

SEQ ID NO: 315 - protein, 546 aa, Artificial Sequence
  Synthetic polypeptide
QRFVTGHFGGLHPANGGGGGSQVQLVQSGAEVKKPGASVKVSCKASGYTFTTYGISWVRQAPGQGLEWMGWINPYTGKTNYAQKLQGRVTMATDTSTSTAYMELRSLRSDDTAVYYCARGSGGFDYWGQGTLVTVSSGGGGSGGGGSGGGGSDIVMTQSPLSLPVTPGEPASISCRSSQSLLHSVGYNYLDWYLQKPGQSPQLLIYLGSNRASGVPDRFSGSGSGTDFTLKISRVEAEDVGVYYCMQALQTPFTFGPGTKLEIKSGGGGSEVQLVESGGGLVQPGGSLKLSCAASGFTFNKYAMNWVRQAPGKGLEWVARIRSKYNNYATYYADSVKDRFTISRDDSKNTAYLQMNNLKTEDTAVYYCVRHGNFGNSYISYWAYWGQGTLVTVSSGGGGSGGGGSGGGGSQTVVTQEPSLTVSPGGTVTLTCGSSTGAVTSGNYPNWVQQKPGQAPRGLIGGTKFLAPGTPARFSGSLLGGKAALTLSGVQPEDEAEYYCVLWYSNRWVFGGGTKLTVLGGGGSQRFVTGHFGGLHPANGHHHHHH

SEQ ID NO: 316 - protein, 546 aa, Artificial Sequence
  Synthetic polypeptide
QRFVTGHFGGLHPANGGGGGSQVQLVQSGAEVKEPGASVKVSCKASGYTFTYYGISWVRQAPGQGLEWMGWINPYTGNRNYAQKVQDRVTMTTDTSTNTAYMELRSLRSDDTAVYYCARGSGGFDYWGQGTLVTVSSGGGGSGGGGSGGGGSDIVMTQSPLSLPVTPGEPASISCRSSQSLLHSVGYNYLDWYLQKPGQSPQLLIYLGSNRASGVPDRFSGSGSGTDFTLKISRVEAEDVGVYYCMQALQTPFTFGPGTKLEIKSGGGGSEVQLVESGGGLVQPGGSLKLSCAASGFTFNKYAMNWVRQAPGKGLEWVARIRSKYNNYATYYADSVKDRFTISRDDSKNTAYLQMNNLKTEDTAVYYCVRHGNFGNSYISYWAYWGQGTLVTVSSGGGGSGGGGSGGGGSQTVVTQEPSLTVSPGGTVTLTCGSSTGAVTSGNYPNWVQQKPGQAPRGLIGGTKFLAPGTPARFSGSLLGGKAALTLSGVQPEDEAEYYCVLWYSNRWVFGGGTKLTVLGGGGSQRFVTGHFGGLHPANGHHHHHH

SEQ ID NO: 317 - protein, 546 aa, Artificial Sequence
  Synthetic polypeptide
QRFVTGHFGGLHPANGGGGGSQVQLVQSGAEVKKPGASVKVSCKASGYTFTYYGISWVRQAPGQGLEWMGWINPYTGKTNYAQKLQGRVTMTTDTSTSTAYMELRSLRSDDTAVYYCARGSGGFDYWGQGTLVTVSSGGGGSGGGGSGGGGSDIVMTQSPLSLPVTPGEPASISCRSSQSLLHSVGYNYLDWYLQKPGQSPQLLIYLGSNRASGVPDRFSGSGSGTDFTLKISRVEAEDVGVYYCMQALQTPFTFGPGTKVEIKSGGGGSEVQLVESGGGLVQPGGSLKLSCAASGFTFNKYAMNWVRQAPGKGLEWVARIRSKYNNYATYYADSVKDRFTISRDDSKNTAYLQMNNLKTEDTAVYYCVRHGNFGNSYISYWAYWGQGTLVTVSSGGGGSGGGGSGGGGSQTVVTQEPSLTVSPGGTVTLTCGSSTGAVTSGNYPNWVQQKPGQAPRGLIGGTKFLAPGTPARFSGSLLGGKAALTLSGVQPEDEAEYYCVLWYSNRWVFGGGTKLTVLGGGGSQRFVTGHFGGLHPANGHHHHHH

SEQ ID NO: 318 - protein, 546 aa, Artificial Sequence
  Synthetic polypeptide
QRFVTGHFGGLHPANGGGGGSQVQLVQSGAEVKKPGASVKVSCKASGYTFTSYGITWVRQAPGQGLEWMGWINPYTGNRNYAQKVQGRVTMTTDTSTSTAYMELRSLRSDDTAVYYCARGSGGFDYWGQGTLVTVSSGGGGSGGGGSGGGGSDIVMTQSPLSLSVTPGEPASISCRSSQSLLHSVGYNYLDWYLQKPGQSPQLLIYLGSNRASGVPDRFSGSGSGTDFTLKISRVEAEDVGVYYCMQALQTPFTFGPGTKVDIKSGGGGSEVQLVESGGGLVQPGGSLKLSCAASGFTFNKYAMNWVRQAPGKGLEWVARIRSKYNNYATYYADSVKDRFTISRDDSKNTAYLQMNNLKTEDTAVYYCVRHGNFGNSYISYWAYWGQGTLVTVSSGGGGSGGGGSGGGGSQTVVTQEPSLTVSPGGTVTLTCGSSTGAVTSGNYPNWVQQKPGQAPRGLIGGTKFLAPGTPARFSGSLLGGKAALTLSGVQPEDEAEYYCVLWYSNRWVFGGGTKLTVLGGGGSQRFVTGHFGGLHPANGHHHHHH

SEQ ID NO: 319 - protein, 546 aa, Artificial Sequence
  Synthetic polypeptide
QRFVTGHFGGLHPANGGGGGSQVQLVQSGAEVKKPGASVKVSCKASGYTFTSYGISWVRQAPGQGLEWMGWINPYTGNRNYAQKFQGRVTMTTDTSTNTAYMELSSLRSEDTAVYYCARGSGGFDYWGQGTLVTVSSGGGGSGGGGSGGGGSDIVMTQSPLSLPVTPGEPASISCRSSQSLLHSVGYNYLDWYLQKPGQSPQLLIYLGSNRASGVPDRFSGSGSGTDFTLKISRVEAEDVGVYYCMQALQTPFTFGPGTKVDIKSGGGGSEVQLVESGGGLVQPGGSLKLSCAASGFTFNKYAMNWVRQAPGKGLEWVARIRSKYNNYATYYADSVKDRFTISRDDSKNTAYLQMNNLKTEDTAVYYCVRHGNFGNSYISYWAYWGQGTLVTVSSGGGGSGGGGSGGGGSQTVVTQEPSLTVSPGGTVTLTCGSSTGAVTSGNYPNWVQQKPGQAPRGLIGGTKFLAPGTPARFSGSLLGGKAALTLSGVQPEDEAEYYCVLWYSNRWVFGGGTKLTVLGGGGSQRFVTGHFGGLHPANGHHHHHH

SEQ ID NO: 320 - protein, 546 aa, Artificial Sequence
  Synthetic polypeptide
QRFVTGHFGGLHPANGGGGGSQVQLVQSGAEVKKPGASVKVSCKASGYSFTSYGISWVRQAPGQGLEWMGWINPYTGNRNYAQKVQGRVTMTTDTSTSTAYMELRSLRSDDTAVYYCARGSGGFDYWGQGTLVTVSSGGGGSGGGGSGGGGSDIVMTQSPLSLPVTPGEPASISCRSSQSLLHSVGYNYLDWYLQKPGQSPQLLIYLGSNRASGVPDRFSGSGSGTDFTLKISRVEAEDVGVYYCMQALQTPFTFGPGTKVEIKSGGGGSEVQLVESGGGLVQPGGSLKLSCAASGFTFNKYAMNWVRQAPGKGLEWVARIRSKYNNYATYYADSVKDRFTISRDDSKNTAYLQMNNLKTEDTAVYYCVRHGNFGNSYISYWAYWGQGTLVTVSSGGGGSGGGGSGGGGSQTVVTQEPSLTVSPGGTVTLTCGSSTGAVTSGNYPNWVQQKPGQAPRGLIGGTKFLAPGTPARFSGSLLGGKAALTLSGVQPEDEAEYYCVLWYSNRWVFGGGTKLTVLGGGGSQRFVTGHFGGLHPANGHHHHHH

SEQ ID NO: 321 - protein, 546 aa, Artificial Sequence
  Synthetic polypeptide
QRFVTGHFGGLHPANGGGGGSQVQLVQSGAEVKKPGASVKVSCKASGYTFTYYGISWVRQAPGQGLEWMGWINPYTGKTNYAQKVQGRVTMTTDTSTSTAYMELRNLRSDDTAVYYCARGSGGFDYWGQGTLVTVSSGGGGSGGGGSGGGGSDIVMTQTPLSLSVTPGQPASISCRSSQSLLHSVGYNYLDWYLQKPGQSPQLLIYLGSNRASGVPDRFSGSGSGTDFTLKISRVEAEDVGVYYCMQALQTPFTFGPGTKVDIKSGGGGSEVQLVESGGGLVQPGGSLKLSCAASGFTFNKYAMNWVRQAPGKGLEWVARIRSKYNNYATYYADSVKDRFTISRDDSKNTAYLQMNNLKTEDTAVYYCVRHGNFGNSYISYWAYWGQGTLVTVSSGGGGSGGGGSGGGGSQTVVTQEPSLTVSPGGTVTLTCGSSTGAVTSGNYPNWVQQKPGQAPRGLIGGTKFLAPGTPARFSGSLLGGKAALTLSGVQPEDEAEYYCVLWYSNRWVFGGGTKLTVLGGGGSQRFVTGHFGGLHPANGHHHHHH

SEQ ID NO: 322 - protein, 546 aa, Artificial Sequence
  Synthetic polypeptide
QRFVTGHFGGLHPANGGGGGSQVQLVQSGAEVKKPGASVKVSCKASGYTFTYYGISWVRQAPGQGLEWMGWINPYTGKTNYAQKLQGRVTMTTDTSTSTAYMELRSLRSDDTAVYYCARGSGGFDYWGQGTLVTVSSGGGGSGGGGSGGGGSDIVMTQTPLSLSVTPGQPASISCRSSQSLLHSVGYNYLDWYLQKPGQSPQLLIYLGSNRASGVPDRFSGSGSGTDFTLKISRVEAEDVGVYYCMQALQTPFTFGPGTKVDIKSGGGGSEVQLVESGGGLVQPGGSLKLSCAASGFTFNKYAMNWVRQAPGKGLEWVARIRSKYNNYATYYADSVKDRFTISRDDSKNTAYLQMNNLKTEDTAVYYCVRHGNFGNSYISYWAYWGQGTLVTVSSGGGGSGGGGSGGGGSQTVVTQEPSLTVSPGGTVTLTCGSSTGAVTSGNYPNWVQQKPGQAPRGLIGGTKFLAPGTPARFSGSLLGGKAALTLSGVQPEDEAEYYCVLWYSNRWVFGGGTKLTVLGGGGSQRFVTGHFGGLHPANGHHHHHH

SEQ ID NO: 323 - protein, 550 aa, Artificial Sequence
  Synthetic polypeptide
QRFVTGHFGGLHPANGGGGGSQVQLVESGGGVVQPGRSLRLSCAASGFTFRNYAMHWVRQAPGKGLEWVAVISYSGNNKYYASSVKGRFTISRDNSKNTLYLQLNSLRAEDTAVYYCAREFYYDSTGYDYSTPGDYWGQGTLVTVSSGGGGSGGGGSGGGGSDIQMTQSPSSLSASVGDRVTITCQASQDISNYLNWYQQKPGKAPKLLIYDASNLETGVPSRFSGSGSGTDFTFTISSLQPEDIATYYCQQYDNLPTFGQGTRLEIKSGGGGSEVQLVESGGGLVQPGGSLKLSCAASGFTFNKYAMNWVRQAPGKGLEWVARIRSKYNNYATYYADSVKDRFTISRDDSKNTAYLQMNNLKTEDTAVYYCVRHGNFGNSYISYWAYWGQGTLVTVSSGGGGSGGGGSGGGGSQTVVTQEPSLTVSPGGTVTLTCGSSTGAVTSGNYPNWVQQKPGQAPRGLIGGTKFLAPGTPARFSGSLLGGKAALTLSGVQPEDEAEYYCVLWYSNRWVFGGGTKLTVLGGGGSQRFVTGHFGGLHPANGHHHHHH

SEQ ID NO: 324 - protein, 551 aa, Artificial Sequence
  Synthetic polypeptide
QRFVTGHFGGLHPANGGGGGSQVQLVESGGGVVQPGRSLRLSCVASGFTFRNYAMHWVRQAPGKGLEWVAVISYSGNNKYYASSVKGRFTISRDNSKNTLYLQLNSLRAEDTAVYYCAREFYYDSTGYDYSTPGDYWGQGTLVTVSSGGGGSGGGGSGGGGSDIQMTQSPSSLSASVGDRVTITCRASQSISSYLNWYQQKPGKAPKLLIYDASSLQSGVPSRFSGSGSGTEFTLTISSLQAEDVAVYYCQQYYSTPLTFGGGTKVDIKSGGGGSEVQLVESGGGLVQPGGSLKLSCAASGFTFNKYAMNWVRQAPGKGLEWVARIRSKYNNYATYYADSVKDRFTISRDDSKNTAYLQMNNLKTEDTAVYYCVRHGNFGNSYISYWAYWGQGTLVTVSSGGGGSGGGGSGGGGSQTVVTQEPSLTVSPGGTVTLTCGSSTGAVTSGNYPNWVQQKPGQAPRGLIGGTKFLAPGTPARFSGSLLGGKAALTLSGVQPEDEAEYYCVLWYSNRWVFGGGTKLTVLGGGGSQRFVTGHFGGLHPANGHHHHHH

SEQ ID NO: 325 - protein, 551 aa, Artificial Sequence
  Synthetic polypeptide
QRFVTGHFGGLHPANGGGGGSQVQLVESGGGVVQPGRSLRLSCAASGFTFRNYAMHWVRQAPGKGLEWVAGISYSGTNKYYASSVKGRFTISRDNSKNTLYLQLNSLRAEDTAVYYCAREFYYDSTGYDYSTPGDYWGQGTLVTVSSGGGGSGGGGSGGGGSDIQMTQSPSSLSASVGDRVTITCQASQDISNYLNWYQQKPGKAPKLLIYDASNLETGVPSRFSGSGSGTEFTLTISSLQPEDIATYYCQQYDNLPLTFGGGTKVDIKSGGGGSEVQLVESGGGLVQPGGSLKLSCAASGFTFNKYAMNWVRQAPGKGLEWVARIRSKYNNYATYYADSVKDRFTISRDDSKNTAYLQMNNLKTEDTAVYYCVRHGNFGNSYISYWAYWGQGTLVTVSSGGGGSGGGGSGGGGSQTVVTQEPSLTVSPGGTVTLTCGSSTGAVTSGNYPNWVQQKPGQAPRGLIGGTKFLAPGTPARFSGSLLGGKAALTLSGVQPEDEAEYYCVLWYSNRWVFGGGTKLTVLGGGGSQRFVTGHFGGLHPANGHHHHHH

SEQ ID NO: 326 - protein, 551 aa, Artificial Sequence
  Synthetic polypeptide
QRFVTGHFGGLHPANGGGGGSQVQLVESGGGVVQPGRSLRLSCVASGFTFRNYAMHWVRQAPGKGLEWVAVISYSGNNKYYASSVKGRFTISRDNSKNTLFLQLNSLRAEDTAVYYCAREFYYDSTGYDYSTPGNYWGQGTLVTVSSGGGGSGGGGSGGGGSDIQMTQSPSSLSASVGDRVTITCQASQDISNYLNWYQQKPGKAPKLLIYDASNLETGVPSRFSGSGSGTDFTFTISSLQPEDIATYYCQQYVNLPLTFGGGTKLEIKSGGGGSEVQLVESGGGLVQPGGSLKLSCAASGFTFNKYAMNWVRQAPGKGLEWVARIRSKYNNYATYYADSVKDRFTISRDDSKNTAYLQMNNLKTEDTAVYYCVRHGNFGNSYISYWAYWGQGTLVTVSSGGGGSGGGGSGGGGSQTVVTQEPSLTVSPGGTVTLTCGSSTGAVTSGNYPNWVQQKPGQAPRGLIGGTKFLAPGTPARFSGSLLGGKAALTLSGVQPEDEAEYYCVLWYSNRWVFGGGTKLTVLGGGGSQRFVTGHFGGLHPANGHHHHHH

SEQ ID NO: 327 - protein, 548 aa, Artificial Sequence
  Synthetic polypeptide
QRFVTGHFGGLHPANGGGGGSQVQLVESGGGVVQPGRSLRLSCAASGFTFSSYGMQWVRQAPGKGLEWVAVIWYSGSNKYYASSVKGRFTISRDNSKNTLYLQMNSLRAEDTAVYYCARDGYPIFYRYYGMDVWGQGTTVTVSSGGGGSGGGGSGGGGSDIQMTQSPSSLSASVGDRVTITCRASQGISNYLAWYQQKPGKVPKLLIYAASTLQSGVPSRFSGSGSGTDFTLTISSLQPEDVATYYCQKYNSAPLTFGGGTKVEIKSGGGGSEVQLVESGGGLVQPGGSLKLSCAASGFTFNKYAMNWVRQAPGKGLEWVARIRSKYNNYATYYADSVKDRFTISRDDSKNTAYLQMNNLKTEDTAVYYCVRHGNFGNSYISYWAYWGQGTLVTVSSGGGGSGGGGSGGGGSQTVVTQEPSLTVSPGGTVTLTCGSSTGAVTSGNYPNWVQQKPGQAPRGLIGGTKFLAPGTPARFSGSLLGGKAALTLSGVQPEDEAEYYCVLWYSNRWVFGGGTKLTVLGGGGSQRFVTGHFGGLHPANGHHHHHH

SEQ ID NO: 328 - protein, 549 aa, Artificial Sequence
  Synthetic polypeptide
QRFVTGHFGGLHPANGGGGGSQVQLVESGGGVVQPGRSLRLSCAASGFTFSSYGMHWVRQAPGKGLEWVAVISYSGSNKYYASSVKGRFTISRDNSKNTLYLQMNSLRAEDTAVYYCARDGYPIFYRYYGMDVWGQGTTVTVSSGGGGSGGGGSGGGGSEIVLTQSPGTLSLSPGERATLSCRASQSVSSSYLAWYQQKPGQAPRLLIYGASSRATGIPDRFSGSGSGTDFTLTISRLEPEDLAVYYCQQYGTSPLTFGGGTKLEIKSGGGGSEVQLVESGGGLVQPGGSLKLSCAASGFTFNKYAMNWVRQAPGKGLEWVARIRSKYNNYATYYADSVKDRFTISRDDSKNTAYLQMNNLKTEDTAVYYCVRHGNFGNSYISYWAYWGQGTLVTVSSGGGGSGGGGSGGGGSQTVVTQEPSLTVSPGGTVTLTCGSSTGAVTSGNYPNWVQQKPGQAPRGLIGGTKFLAPGTPARFSGSLLGGKAALTLSGVQPEDEAEYYCVLWYSNRWVFGGGTKLTVLGGGGSQRFVTGHFGGLHPANGHHHHHH

SEQ ID NO: 329 - protein, 549 aa, Artificial Sequence
  Synthetic polypeptide
QRFVTGHFGGLHPANGGGGGSQVQLVESGGGVVQPGRSLRLSCAASGFTFSSFGMHWVRQAPGKGLEWVAFIWYSGSNKYYASSVKGRVTISRDNSKNTLYLQMNSLRAEDTAVYYCARDGYPIFYYYYGMDVWGQGTTVTVSSGGGGSGGGGSGGGGSEIVLTQSPGTLSLSPGERATLSCRASQSVSSSYLAWYQQKPGQAPRLLIYGASSRATGIPDRFSGSGSGTDFTLTISRLEPEDFAVYYCQQYGSSPFTFGPGTRLEIKSGGGGSEVQLVESGGGLVQPGGSLKLSCAASGFTFNKYAMNWVRQAPGKGLEWVARIRSKYNNYATYYADSVKDRFTISRDDSKNTAYLQMNNLKTEDTAVYYCVRHGNFGNSYISYWAYWGQGTLVTVSSGGGGSGGGGSGGGGSQTVVTQEPSLTVSPGGTVTLTCGSSTGAVTSGNYPNWVQQKPGQAPRGLIGGTKFLAPGTPARFSGSLLGGKAALTLSGVQPEDEAEYYCVLWYSNRWVFGGGTKLTVLGGGGSQRFVTGHFGGLHPANGHHHHHH

SEQ ID NO: 330 - protein, 549 aa, Artificial Sequence
  Synthetic polypeptide
QRFVTGHFGGLYPANGGGGGSQVQLVESGGGVVQPGGSLRLSCAASGFTFSSYGMHWVRQAPGKGLEWVAFIWYDGSNKYYADSVKGRFTISRDNSKNTLYLQMNSLRAEDTAVYYCARRAGIIGTIGYYYGMDVWGQGTTVTVSSGGGGSGGGGSGGGGSSYELTQPPSVSVSPGQTASITCSGDRLGEKYTSWYQQRPGQSPLLVIYQDTKRPSGIPERFSGSNSGNTATLTISGTQAMDEADYYCQAWESSTVVFGGGTKLTVLSGGGGSEVQLVESGGGLVQPGGSLKLSCAASGFTFNKYAMNWVRQAPGKGLEWVARIRSKYNNYATYYADSVKDRFTISRDDSKNTAYLQMNNLKTEDTAVYYCVRHGNFGNSYISYWAYWGQGTLVTVSSGGGGSGGGGSGGGGSQTVVTQEPSLTVSPGGTVTLTCGSSTGAVTSGNYPNWVQQKPGQAPRGLIGGTKFLAPGTPARFSGSLLGGKAALTLSGVQPEDEAEYYCVLWYSNRWVFGGGTKLTVLGGGGSQRFVTGHFGGLHPANGHHHHHH

SEQ ID NO: 331 - protein, 546 aa, Artificial Sequence
  Synthetic polypeptide
QRFVTGHFGGLYPANGGGGGSQVQLQESGPGLVKPSQTLSLTCTVSGGSISRGGYYWSWIRQHPGKGLEWIGYIFYRGRTYYNPSLKSRVTISVDTSKNQFSLKLSSVTAADTAVYYCARVNSNYGWFDPWGQGTLVTVSSGGGGSGGGGSGGGGSEIVLTQFPGTLSLSPGERATLSCRASQSVSSSYLAWYQQKPGQAPRLLIYGASSRATGIPDRFSGSGSGTDFTLTISRLEPEDFAVYYCQQYGSSPLTFGGGTKLEIKSGGGGSEVQLVESGGGLVQPGGSLKLSCAASGFTFNKYAMNWVRQAPGKGLEWVARIRSKYNNYATYYADSVKDRFTISRDDSKNTAYLQMNNLKTEDTAVYYCVRHGNFGNSYISYWAYWGQGTLVTVSSGGGGSGGGGSGGGGSQTVVTQEPSLTVSPGGTVTLTCGSSTGAVTSGNYPNWVQQKPGQAPRGLIGGTKFLAPGTPARFSGSLLGGKAALTLSGVQPEDEAEYYCVLWYSNRWVFGGGTKLTVLGGGGSQRFVTGHFGGLHPANGHHHHHH

SEQ ID NO: 332 - protein, 546 aa, Artificial Sequence
  Synthetic polypeptide
QRFVTGHFGGLYPANGGGGGSQVQLQESGPGLVKPSQTLSLTCTVSGGSISSGGYYWSWIRQHPGKGLEWIGYIFYRGRTYYNPSLKSRVTISVDTSKNQFSLKLSSVTAADTAVYYCARVYSNYGWFDPWGQGTLVTVSSGGGGSGGGGSGGGGSEIVLTQSPGTLSLSPGERATLSCRASQSVSSSYLAWYQQKPGQAPRLLIYGTSNRATGIPDRFSGSGSGTDFTLTISRLEPEDFAVYYCQQYGSSPLTFGGGTKLEIKSGGGGSEVQLVESGGGLVQPGGSLKLSCAASGFTFNKYAMNWVRQAPGKGLEWVARIRSKYNNYATYYADSVKDRFTISRDDSKNTAYLQMNNLKTEDTAVYYCVRHGNFGNSYISYWAYWGQGTLVTVSSGGGGSGGGGSGGGGSQTVVTQEPSLTVSPGGTVTLTCGSSTGAVTSGNYPNWVQQKPGQAPRGLIGGTKFLAPGTPARFSGSLLGGKAALTLSGVQPEDEAEYYCVLWYSNRWVFGGGTKLTVLGGGGSQRFVTGHFGGLHPANGHHHHHH

SEQ ID NO: 333 - protein, 546 aa, Artificial Sequence
  Synthetic polypeptide
QRFVTGHFGGLYPANGGGGGSQVQLQESGPGLVKPSQTLSLTCTVSGGSISSGGYYWSWIRQHPGKGLEWIGYIFYSGRTYYNPSLKSRVTISVDTSKNQFSLKLSSVTAADTAVYYCARVYSNYGWFDPWGQGTLVTVSSGGGGSGGGGSGGGGSEIVLTQSPGTLSLSPGERATLSCRASQSVSSSYLAWYQQKPGQAPRLLIYGASSRATGIPDRFSGSGSGTDFTLTISRLEPEDFAVYYCQQYGSSPLTFGGGTKLEIKSGGGGSEVQLVESGGGLVQPGGSLKLSCAASGFTFNKYAMNWVRQAPGKGLEWVARIRSKYNNYATYYADSVKDRFTISRDDSKNTAYLQMNNLKTEDTAVYYCVRHGNFGNSYISYWAYWGQGTLVTVSSGGGGSGGGGSGGGGSQTVVTQEPSLTVSPGGTVTLTCGSSTGAVTSGNYPNWVQQKPGQAPRGLIGGTKFLAPGTPARFSGSLLGGKAALTLSGVQPEDEAEYYCVLWYSNRWVFGGGTKLTVLGGGGSQRFVTGHFGGLHPANGHHHHHH

SEQ ID NO: 334 - protein, 546 aa, Artificial Sequence
  Synthetic polypeptide
QRFVTGHFGGLYPANGGGGGSQVQLQESGPGLVKPSQTLSLTCTVSGGSISSGGYYWSWIRQHPGKGLEWIGYIFYSGRTYYNPSLKSRVTISVDTSKNQFSLKLRSVTAADTAVYYCARVYSNYGWFDPWGQGTLVTVSSGGGGSGGGGSGGGGSEIVLTQSPGTLSLSPGERATLSCRASQSVSSSYLAWYQQKPGQAPRLLIYGASSRATGIPDRFSGSGSGTDFTLTISRLEPEDFAVYYCQQYGSSPLTFGGGTKLEIKSGGGGSEVQLVESGGGLVQPGGSLKLSCAASGFTFNKYAMNWVRQAPGKGLEWVARIRSKYNNYATYYADSVKDRFTISRDDSKNTAYLQMNNLKTEDTAVYYCVRHGNFGNSYISYWAYWGQGTLVTVSSGGGGSGGGGSGGGGSQTVVTQEPSLTVSPGGTVTLTCGSSTGAVTSGNYPNWVQQKPGQAPRGLIGGTKFLAPGTPARFSGSLLGGKAALTLSGVQPEDEAEYYCVLWYSNRWVFGGGTKLTVLGGGGSQRFVTGHFGGLHPANGHHHHHH

SEQ ID NO: 335 - protein, 546 aa, Artificial Sequence
  Synthetic polypeptide
QRFVTGHFGGLYPANGGGGGSQVQLQESGPGLVKPSQTLSLTCTVSGGSISSGGYYWSWIRQHPGKGLEWIGYIYYSGSTFYNPSLRSRVTISVDTSKNQFSLKLSSVTAADTAVYYCARDSSSSRALDYWGQGTLVTVSSGGGGSGGGGSGGGGSEIVLTQSPGTLSLSPGERATLSCRASQSVSSSYLAWYQQKPGQAPRLLIYGASSRATGIPDRFSGSGSGTDFTLTISRLEPEDFAVYYCQQYDSSPRTFGQGTKLEIKSGGGGSEVQLVESGGGLVQPGGSLKLSCAASGFTFNKYAMNWVRQAPGKGLEWVARIRSKYNNYATYYADSVKDRFTISRDDSKNTAYLQMNNLKTEDTAVYYCVRHGNFGNSYISYWAYWGQGTLVTVSSGGGGSGGGGSGGGGSQTVVTQEPSLTVSPGGTVTLTCGSSTGAVTSGNYPNWVQQKPGQAPRGLIGGTKFLAPGTPARFSGSLLGGKAALTLSGVQPEDEAEYYCVLWYSNRWVFGGGTKLTVLGGGGSQRFVTGHFGGLHPANGHHHHHH

SEQ ID NO: 336 - protein, 546 aa, Artificial Sequence
  Synthetic polypeptide
QRFVTGHFGGLYPANGGGGGSQVQLQESGPGLVKPSQTLSLTCTVSGGSISSGGYYWSWIRQHPGKGLEWIGYIYYRGRTYYNPSLKSRVTISVDTSKNQFSLKLSSVTAADTAVYYCARVYSNYGWFDPWGQGTLVTVSSGGGGSGGGGSGGGGSEIVLTQSPGTLSLSPGERATLSCRASQSVSSSYLAWYQQKPGQAPRLLIYGASSRATGIPDRFSGSGSGTDFTLTISRLEPEDFAVYYCQQYGSSPLTFGGGTKLEIKSGGGGSEVQLVESGGGLVQPGGSLKLSCAASGFTFNKYAMNWVRQAPGKGLEWVARIRSKYNNYATYYADSVKDRFTISRDDSKNTAYLQMNNLKTEDTAVYYCVRHGNFGNSYISYWAYWGQGTLVTVSSGGGGSGGGGSGGGGSQTVVTQEPSLTVSPGGTVTLTCGSSTGAVTSGNYPNWVQQKPGQAPRGLIGGTKFLAPGTPARFSGSLLGGKAALTLSGVQPEDEAEYYCVLWYSNRWVFGGGTKLTVLGGGGSQRFVTGHFGGLHPANGHHHHHH

SEQ ID NO: 337 - protein, 545 aa, Artificial Sequence
  Synthetic polypeptide
QRFVTGHFGGLYPANGGGGGSQVQLQESGPGLVKPSETLSLTCTVSGGSISSGGYYWSWIRQHPGKGLEWIGYIFYRGRTYYNPSLKSRVTISVDTSKNQFSLKLSSVTAADTAVYYCARVYSNYGWFDPWGQGTLVTVSSGGGGSGGGGSGGGGSEIVLTQSPGTLSLSPGERATLSCRASQSVSSSYLAWYQQKPGQAPRLLIYGASSRATGIPDRFSGSGSGTDFTLTISRLEPEDFAVYYCQQYGSSPTFGGGTKVEIKSGGGGSEVQLVESGGGLVQPGGSLKLSCAASGFTFNKYAMNWVRQAPGKGLEWVARIRSKYNNYATYYADSVKDRFTISRDDSKNTAYLQMNNLKTEDTAVYYCVRHGNFGNSYISYWAYWGQGTLVTVSSGGGGSGGGGSGGGGSQTVVTQEPSLTVSPGGTVTLTCGSSTGAVTSGNYPNWVQQKPGQAPRGLIGGTKFLAPGTPARFSGSLLGGKAALTLSGVQPEDEAEYYCVLWYSNRWVFGGGTKLTVLGGGGSQRFVTGHFGGLHPANGHHHHHH

SEQ ID NO: 338 - protein, 546 aa, Artificial Sequence
  Synthetic polypeptide
QRFVTGHFGGLYPANGGGGGSQVQLQESGPGLVKPSQTLSLTCTVSGGSISSGGYYWSWIRQHPGKGLEWIGYIFYRGRTYYNPSLKSRVTISVDTSKNQFSLKLSSVTAADTAVYYCARVYSNYGWFDPWGQGTLVTVSSGGGGSGGGGSGGGGSEIVLTQSPGTLSLSPGERATLSCRASQSVSSSYLAWYQQKPGQAPRLLIYGASSRATGIPDRFSGSGSGTDFTLTISRLEPEDFAVYYCQQYGSSPLTFGGGTKVEIKSGGGGSEVQLVESGGGLVQPGGSLKLSCAASGFTFNKYAMNWVRQAPGKGLEWVARIRSKYNNYATYYADSVKDRFTISRDDSKNTAYLQMNNLKTEDTAVYYCVRHGNFGNSYISYWAYWGQGTLVTVSSGGGGSGGGGSGGGGSQTVVTQEPSLTVSPGGTVTLTCGSSTGAVTSGNYPNWVQQKPGQAPRGLIGGTKFLAPGTPARFSGSLLGGKAALTLSGVQPEDEAEYYCVLWYSNRWVFGGGTKLTVLGGGGSQRFVTGHFGGLHPANGHHHHHH

SEQ ID NO: 339 - protein, 545 aa, Artificial Sequence
  Synthetic polypeptide
QRFVTGHFGGLYPANGGGGGSQVQLQESGPGLVKPSQTLSLTCTVSGGSISSGGYYWSWIRQHPGKGLEWIGYIYYRGRTYYNPSLKSRVTISVDTSKNQFSLKLSSVTAADTAVYYCARVYSNYGWFDPWGQGTLVTVSSGGGGSGGGGSGGGGSEIVLTQSPGTLSLSPGERATLSCRASQSVSSSYLAWYQQKPGQAPRLLIYGASSRATGIPDRFSGSGSGTDFTLTISRLEPEDFAVYYCQQYGSSPTFGPGTKVEIKSGGGGSEVQLVESGGGLVQPGGSLKLSCAASGFTFNKYAMNWVRQAPGKGLEWVARIRSKYNNYATYYADSVKDRFTISRDDSKNTAYLQMNNLKTEDTAVYYCVRHGNFGNSYISYWAYWGQGTLVTVSSGGGGSGGGGSGGGGSQTVVTQEPSLTVSPGGTVTLTCGSSTGAVTSGNYPNWVQQKPGQAPRGLIGGTKFLAPGTPARFSGSLLGGKAALTLSGVQPEDEAEYYCVLWYSNRWVFGGGTKLTVLGGGGSQRFVTGHFGGLHPANGHHHHHH

SEQ ID NO: 340 - protein, 545 aa, Artificial Sequence
  Synthetic polypeptide
QRFVTGHFGGLYPANGGGGGSQVQLQESGPGLVKPSQTLSLTCTVSGGSISSGGYYWSWIRQHPGKGLEWIGYIYYRGRTYYNPSLKSRVTISVDTSKNQFSLKLSSVTAADTAVYYCARVYSNYGWFDPWGQGTLVTVSSGGGGSGGGGSGGGGSEIVLTQSPGTLSLSPGERATLSCRASQSVSSSYLAWYQQKPGQAPRLLIYGASSRATGIPDRFSGSGSGTDFTLTISRLEPEDFAVYYCQQYGSSPTFGGGTKVEIKSGGGGSEVQLVESGGGLVQPGGSLKLSCAASGFTFNKYAMNWVRQAPGKGLEWVARIRSKYNNYATYYADSVKDRFTISRDDSKNTAYLQMNNLKTEDTAVYYCVRHGNFGNSYISYWAYWGQGTLVTVSSGGGGSGGGGSGGGGSQTVVTQEPSLTVSPGGTVTLTCGSSTGAVTSGNYPNWVQQKPGQAPRGLIGGTKFLAPGTPARFSGSLLGGKAALTLSGVQPEDEAEYYCVLWYSNRWVFGGGTKLTVLGGGGSQRFVTGHFGGLHPANGHHHHHH

SEQ ID NO: 341 - protein, 545 aa, Artificial Sequence
  Synthetic polypeptide
QRFVTGHFGGLYPANGGGGGSQVQLQESGPGLVKPSQTLSLTCTISGGSISSGGYYWSWIRQHPGKGLEWIGYIFYSGRTYYNPSLKSRVTISVDTSKNQFSLKLTSVTAADTAVYYCARVNSNYGWFDPWGQGTLVTVSSGGGGSGGGGSGGGGSEIVLTQSPGTLSLSPGERATLSCRASQSVSSSYLAWYQQKPGQAPRLLIYGASSRATGIPDRFSGSGSGTDFTLTISRLEPEDFAVYYCQQYGSSPTFGGGTKVEIKSGGGGSEVQLVESGGGLVQPGGSLKLSCAASGFTFNKYAMNWVRQAPGKGLEWVARIRSKYNNYATYYADSVKDRFTISRDDSKNTAYLQMNNLKTEDTAVYYCVRHGNFGNSYISYWAYWGQGTLVTVSSGGGGSGGGGSGGGGSQTVVTQEPSLTVSPGGTVTLTCGSSTGAVTSGNYPNWVQQKPGQAPRGLIGGTKFLAPGTPARFSGSLLGGKAALTLSGVQPEDEAEYYCVLWYSNRWVFGGGTKLTVLGGGGSQRFVTGHFGGLHPANGHHHHHH

SEQ ID NO: 342 - protein, 546 aa, Artificial Sequence
  Synthetic polypeptide
QRFVTGHFGGLYPANGGGGGSQVQLQESGPGLVKPSQTLSLTCTVSGGSISSGGYYWSWIRQHPGKGLDWIGYIFYRGRTYYNPSLKSRVTISVDTSKNQFSLKLSSVTAADTAVYYCARVNSNYGWFDPWGQGTLVTVSSGGGGSGGGGSGGGGSEIVLTQSPGTLSLSPGERATLSCRASQSVSSSYLAWYQQKPGQAPRLLIYGASSRATGIPDRFSGSGSGTDFTLTISRLEPEDFAVYYCQQYGSSPLTFGGGTKVEIKSGGGGSEVQLVESGGGLVQPGGSLKLSCAASGFTFNKYAMNWVRQAPGKGLEWVARIRSKYNNYATYYADSVKDRFTISRDDSKNTAYLQMNNLKTEDTAVYYCVRHGNFGNSYISYWAYWGQGTLVTVSSGGGGSGGGGSGGGGSQTVVTQEPSLTVSPGGTVTLTCGSSTGAVTSGNYPNWVQQKPGQAPRGLIGGTKFLAPGTPARFSGSLLGGKAALTLSGVQPEDEAEYYCVLWYSNRWVFGGGTKLTVLGGGGSQRFVTGHFGGLHPANGHHHHHH

SEQ ID NO: 343 - protein, 545 aa, Artificial Sequence
  Synthetic polypeptide
QRFVTGHFGGLYPANGGGGGSQVQLQESGPGLVKPSQTLSLTCTVSGGSISSGGYYWSWIRQHPGKGLEWIGYIYYRGRTYYNPSLKSRVTISVDTSKNQFSLKLSSVTAADTAVYYCARVYSNYGWFDPWGQGTLVTVSSGGGGSGGGGSGGGGSEIVLTQSPGTLSLSPGERATLSCRASQSVSSSYLAWYQQKPGQAPRLLIYGASTRATGIPDRFSGSGSGTDFTLTISRLEPEDFAVYYCQQYGSSPSFGQGTKVEIKSGGGGSEVQLVESGGGLVQPGGSLKLSCAASGFTFNKYAMNWVRQAPGKGLEWVARIRSKYNNYATYYADSVKDRFTISRDDSKNTAYLQMNNLKTEDTAVYYCVRHGNFGNSYISYWAYWGQGTLVTVSSGGGGSGGGGSGGGGSQTVVTQEPSLTVSPGGTVTLTCGSSTGAVTSGNYPNWVQQKPGQAPRGLIGGTKFLAPGTPARFSGSLLGGKAALTLSGVQPEDEAEYYCVLWYSNRWVFGGGTKLTVLGGGGSQRFVTGHFGGLHPANGHHHHHH

SEQ ID NO: 344 - protein, 546 aa, Artificial Sequence
  Synthetic polypeptide
QRFVTGHFGGLYPANGGGGGSQVQLQESGPGLVRPSQTLSLTCTVSGGSISSGGYYWSWIRQHPGKGLEWIGYIYYRGRTYYNPSLKSRVTISVDTSKNQFSLKLSSVTAADTAVYYCARVYSNYGWFDPWGQGTLVTVSSGGGGSGGGGSGGGGSEIVLTQSPGTLSLSPGERATLSCRASQSVSSSYLAWYQQKPGQAPRLLIYGASSRATGIPDRFSGSGSGTDFTLTISRLEPEDFAVYYCQQYDTSPLTFGGGTKVEIKSGGGGSEVQLVESGGGLVQPGGSLKLSCAASGFTFNKYAMNWVRQAPGKGLEWVARIRSKYNNYATYYADSVKDRFTISRDDSKNTAYLQMNNLKTEDTAVYYCVRHGNFGNSYISYWAYWGQGTLVTVSSGGGGSGGGGSGGGGSQTVVTQEPSLTVSPGGTVTLTCGSSTGAVTSGNYPNWVQQKPGQAPRGLIGGTKFLAPGTPARFSGSLLGGKAALTLSGVQPEDEAEYYCVLWYSNRWVFGGGTKLTVLGGGGSQRFVTGHFGGLHPANGHHHHHH

SEQ ID NO: 345 - protein, 545 aa, Artificial Sequence; identical to SEQ ID NO: 340
  Synthetic polypeptide

SEQ ID NO: 346 - protein, 546 aa, Artificial Sequence
  Synthetic polypeptide
QRFVTGHFGGLYPANGGGGGSQVQLQESGPGLVKPSQTLSLTCTVSGGSISSGGYYWSWIRQHPGKGLEWIGYIYYRGRTYYNPSLKSRVTISVDTSKNQFSLKLSSVTAADTAVYYCARVYSNYGWFDPWGQGTLVTVSSGGGGSGGGGSGGGGSEIVLTQSPGTLSLSPGERATLSCRASQSVSSSYLAWYQQKPGQAPRLLIYGASSRATGIPDRFSGSGSGTDFTLTISRLEPEDFAVYYCQQYGSSPLTFGGGTKVEIKSGGGGSEVQLVESGGGLVQPGGSLKLSCAASGFTFNKYAMNWVRQAPGKGLEWVARIRSKYNNYATYYADSVKDRFTISRDDSKNTAYLQMNNLKTEDTAVYYCVRHGNFGNSYISYWAYWGQGTLVTVSSGGGGSGGGGSGGGGSQTVVTQEPSLTVSPGGTVTLTCGSSTGAVTSGNYPNWVQQKPGQAPRGLIGGTKFLAPGTPARFSGSLLGGKAALTLSGVQPEDEAEYYCVLWYSNRWVFGGGTKLTVLGGGGSQRFVTGHFGGLHPANGHHHHHH

SEQ ID NO: 347 - protein, 546 aa, Artificial Sequence
  Synthetic polypeptide
QRFVTGHFGGLYPANGGGGGSQVQLQESGPGLVKPSQTLSLTCTVSGGSISSGGYYWSWVRQHPGKGLEWIGYIFYSGRTYYNPSLKSRVIISVDTSKNQFSLKLSSVTAADTAVYYCARVYSNYGWFDPWGQGTLVTVSSGGGGSGGGGSGGGGSEIVLTQSPGTLSLSPGERATLSCRASQSVSSSYLAWYQQKPGQAPRLLIYGASSRATGIPDRFSGSGSGTDFTLTISRLEPEDFAVYYCQQYGSSPLTFGGGTKVEIKSGGGGSEVQLVESGGGLVQPGGSLKLSCAASGFTFNKYAMNWVRQAPGKGLEWVARIRSKYNNYATYYADSVKDRFTISRDDSKNTAYLQMNNLKTEDTAVYYCVRHGNFGNSYISYWAYWGQGTLVTVSSGGGGSGGGGSGGGGSQTVVTQEPSLTVSPGGTVTLTCGSSTGAVTSGNYPNWVQQKPGQAPRGLIGGTKFLAPGTPARFSGSLLGGKAALTLSGVQPEDEAEYYCVLWYSNRWVFGGGTKLTVLGGGGSQRFVTGHFGGLHPANGHHHHHH

SEQ ID NO: 348 - protein, 546 aa, Artificial Sequence
  Synthetic polypeptide
QRFVTGHFGGLYPANGGGGGSQVQLQESGPGLVKPSQTLSLTCTVSGGSISSGGYYWSWIRQHPGKGLEWIGYIFYSGRTYYNPSLKSRVTISVDTSKNQFSLKLSSVTAADTAVYYCARVYSNYGWFDPWGQGTLVTVSSGGGGSGGGGSGGGGSEIVLTQSPGTLSLSPGERATLSCRASQSVSSSYLAWYQQKPGQAPRLLIYGASSRATGIPDRFSGSGSGTDFTLTISRLEPEDFAVYYCQQYGSSPLTFGGGTKVEIKSGGGGSEVQLVESGGGLVQPGGSLKLSCAASGFTFNKYAMNWVRQAPGKGLEWVARIRSKYNNYATYYADSVKDRFTISRDDSKNTAYLQMNNLKTEDTAVYYCVRHGNFGNSYISYWAYWGQGTLVTVSSGGGGSGGGGSGGGGSQTVVTQEPSLTVSPGGTVTLTCGSSTGAVTSGNYPNWVQQKPGQAPRGLIGGTKFLAPGTPARFSGSLLGGKAALTLSGVQPEDEAEYYCVLWYSNRWVFGGGTKLTVLGGGGSQRFVTGHFGGLHPANGHHHHHH

SEQ ID NO: 349 - protein, 546 aa, Artificial Sequence
  Synthetic polypeptide
QRFVTGHFGGLYPANGGGGGSQVQLQESGPGLVKPSQTLSLTCTVSGGSISSGGYYWSWIRQHPGKGLEWIGYIFYSGRTYYNPSLKSRVSISVDTSKNQFSLKLSSVTAADTAVYYCARVYSNYGWFDPWGQGTLVTVSSGGGGSGGGGSGGGGSEIVLTQSPGTLSLSPGERATLSCRASQSVSSSYLAWYQQKPGQAPRLLIYGASSRATGIPDRFSGSGSGTDFTLTISRLEPEDFAVYYCQQYGSSPLTFGGGTKVEIKSGGGGSEVQLVESGGGLVQPGGSLKLSCAASGFTFNKYAMNWVRQAPGKGLEWVARIRSKYNNYATYYADSVKDRFTISRDDSKNTAYLQMNNLKTEDTAVYYCVRHGNFGNSYISYWAYWGQGTLVTVSSGGGGSGGGGSGGGGSQTVVTQEPSLTVSPGGTVTLTCGSSTGAVTSGNYPNWVQQKPGQAPRGLIGGTKFLAPGTPARFSGSLLGGKAALTLSGVQPEDEAEYYCVLWYSNRWVFGGGTKLTVLGGGGSQRFVTGHFGGLHPANGHHHHHH

SEQ ID NO: 350 - protein, 546 aa, Artificial Sequence
  Synthetic polypeptide
QRFVTGHFGGLYPANGGGGGSQVQLQESGPGLVKPSETLSLTCTVSGGSVSSGGYYWSWIRQPPGKGLEWIGYIYYRGRTYYNPSLKSRVTISVDTSKNQFSLKLSSVTAADTAVYYCARVYSNYGWFDPWGQGTLVTVSSGGGGSGGGGSGGGGSEIVLTQSPGTLSLSPGERATLSCRASQSVSSSYLAWYQQKPGQAPRLLIYGASSRATGIPDRFSGSGSGTDFTLTISRLEPEDFAVYYCQQYGSSPLTFGGGTKVEIKSGGGGSEVQLVESGGGLVQPGGSLKLSCAASGFTFNKYAMNWVRQAPGKGLEWVARIRSKYNNYATYYADSVKDRFTISRDDSKNTAYLQMNNLKTEDTAVYYCVRHGNFGNSYISYWAYWGQGTLVTVSSGGGGSGGGGSGGGGSQTVVTQEPSLTVSPGGTVTLTCGSSTGAVTSGNYPNWVQQKPGQAPRGLIGGTKFLAPGTPARFSGSLLGGKAALTLSGVQPEDEAEYYCVLWYSNRWVFGGGTKLTVLGGGGSQRFVTGHFGGLHPANGHHHHHH

SEQ ID NO: 351 - protein, 545 aa, Artificial Sequence
  Synthetic polypeptide
QRFVTGHFGGLYPANGGGGGSQVQLQESGPGLVKPSQTLSLTCTVSGGSISSGGYYWSWIRQHPGKGLEWIGYIYYRGRTYYNPSLKSRVTISVDTSKNQFSLKLSSVTAADTAVYYCARVYSNYGWFDPWGQGTLVTVSSGGGGSGGGGSGGGGSEIVLTQSPGTLSLSPGERATLSCRASQSVSSSYLAWYQQKPGQAPRLLIYGASSRATGIPDRFSGSGSGTDFTLTISRLEPEDFAVYYCQQYGSSPTFGQGTRLEIKSGGGGSEVQLVESGGGLVQPGGSLKLSCAASGFTFNKYAMNWVRQAPGKGLEWVARIRSKYNNYATYYADSVKDRFTISRDDSKNTAYLQMNNLKTEDTAVYYCVRHGNFGNSYISYWAYWGQGTLVTVSSGGGGSGGGGSGGGGSQTVVTQEPSLTVSPGGTVTLTCGSSTGAVTSGNYPNWVQQKPGQAPRGLIGGTKFLAPGTPARFSGSLLGGKAALTLSGVQPEDEAEYYCVLWYSNRWVFGGGTKLTVLGGGGSQRFVTGHFGGLHPANGHHHHHH

SEQ ID NO: 352 - protein, 546 aa, Artificial Sequence
  Synthetic polypeptide
QRFVTGHFGGLYPANGGGGGSQVQLQESGPGLVKPSQTLSLTCTVSGGSISSGGYYWSWIRQHPGKGLEWIGYIFYSGKTYYNPSLKSRVSISVDTSKNQFSLKLSSVTAADTAVYYCARVYSNYGWFDPWGQGTLVTVSSGGGGSGGGGSGGGGSEIVLTQSPGTLSLSPGERATLSCRASQSVSSSYLAWYQQKPGQAPRLLIYGASSRATGIPDRFSGSGSGTDFTLTISRLEPEDFAVYYCQQYGSSPITFGQGTRLEIKSGGGGSEVQLVESGGGLVQPGGSLKLSCAASGFTFNKYAMNWVRQAPGKGLEWVARIRSKYNNYATYYADSVKDRFTISRDDSKNTAYLQMNNLKTEDTAVYYCVRHGNFGNSYISYWAYWGQGTLVTVSSGGGGSGGGGSGGGGSQTVVTQEPSLTVSPGGTVTLTCGSSTGAVTSGNYPNWVQQKPGQAPRGLIGGTKFLAPGTPARFSGSLLGGKAALTLSGVQPEDEAEYYCVLWYSNRWVFGGGTKLTVLGGGGSQRFVTGHFGGLHPANGHHHHHH

SEQ ID NO: 353 - protein, 551 aa, Artificial Sequence
  Synthetic polypeptide
QRFVTGHFGGLYPANGGGGGSQVQLQESGPGLVKPSETLSLTCTVSGGSISSYYWSWIRQPPGKGLEWIGYIYYSGSTNYNPSLKSRVTMSIDTSKNQFSLKLISVTAADTAVYYCARDQRRIVAAGGYYYGMDVWGQGTTVTVSSGGGGSGGGGSGGGGSEIVLTQSPGTLSLSPGERATLSCRASQSVSSSYLAWYQQKPGQAPRLLIYGASTRATGIPARFSGSGSGTDFTLTISRLEPEDFAVYYCQQYGSSPFTFGPGTKVDIKSGGGGSEVQLVESGGGLVQPGGSLKLSCAASGFTFNKYAMNWVRQAPGKGLEWVARIRSKYNNYATYYADSVKDRFTISRDDSKNTAYLQMNNLKTEDTAVYYCVRHGNFGNSYISYWAYWGQGTLVTVSSGGGGSGGGGSGGGGSQTVVTQEPSLTVSPGGTVTLTCGSSTGAVTSGNYPNWVQQKPGQAPRGLIGGTKFLAPGTPARFSGSLLGGKAALTLSGVQPEDEAEYYCVLWYSNRWVFGGGTKLTVLGGGGSQRFVTGHFGGLHPANGHHHHHH

SEQ ID NO: 354 - protein, 545 aa, Artificial Sequence
  Synthetic polypeptide
QRFVTGHFGGLYPANGGGGGSQVQLQESGPGLVKPSQTLSLTCTVSGGSISSNDYYWSWIRQHPGKGLEWIGYIYYSGSTFYNPSLKSRGAISVDTSKNQFSLKLTSVTAADTAVYYCARGVYRTGAFDIWGQGTMVTVSSGGGGSGGGGSGGGGSDIQMTQSPSSLSASVGDRVTITCRASQSISSYLNWYQQKPGKAPKSLIYAASSLQSGVPSKFSGSGSGTDFTLTISSLQPEDIATYYCQQSYSTPQAFGGGTKVDIKSGGGGSEVQLVESGGGLVQPGGSLKLSCAASGFTFNKYAMNWVRQAPGKGLEWVARIRSKYNNYATYYADSVKDRFTISRDDSKNTAYLQMNNLKTEDTAVYYCVRHGNFGNSYISYWAYWGQGTLVTVSSGGGGSGGGGSGGGGSQTVVTQEPSLTVSPGGTVTLTCGSSTGAVTSGNYPNWVQQKPGQAPRGLIGGTKFLAPGTPARFSGSLLGGKAALTLSGVQPEDEAEYYCVLWYSNRWVFGGGTKLTVLGGGGSQRFVTGHFGGLHPANGHHHHHH

SEQ ID NO: 355 - protein, 546 aa, Artificial Sequence
  Synthetic polypeptide
QRFVTGHFGGLYPANGGGGGSQVQLVQSGAEVKKPGASVKVSCKASGYTFTYYGISWVRQAPGQGLEWMGWINPYGGETNYAQKLQGRVTMTTDTSTSTAYMELRSLRSDDTAVYYCARGSGGFDYWGQGTLVTVSSGGGGSGGGGSGGGGSDIVMTQTPLSLSVTPGEPASISCRSSQSLLHSNGYNYLDWYLQKPGQSPQLLIYLGSYRASGVPDRFSGSGSGTDFTLKISRVEAEDVGVYYCMQALQTPFTFGPGTKVDIKSGGGGSEVQLVESGGGLVQPGGSLKLSCAASGFTFNKYAMNWVRQAPGKGLEWVARIRSKYNNYATYYADSVKDRFTISRDDSKNTAYLQMNNLKTEDTAVYYCVRHGNFGNSYISYWAYWGQGTLVTVSSGGGGSGGGGSGGGGSQTVVTQEPSLTVSPGGTVTLTCGSSTGAVTSGNYPNWVQQKPGQAPRGLIGGTKFLAPGTPARFSGSLLGGKAALTLSGVQPEDEAEYYCVLWYSNRWVFGGGTKLTVLGGGGSQRFVTGHFGGLHPANGHHHHHH

SEQ ID NO: 356 - protein, 546 aa, Artificial Sequence
  Synthetic polypeptide
QRFVTGHFGGLYPANGGGGGSQVQLVQSGAEVKKPGASVKVSCKASGYTFTYYGISWVRQAPGQGLEWMGWINPYSGATNYAQKLQGRVTMTTDTSTSTAYMELRSLRSDDTAVYYCARGSGGFDYWGQGTLVTVSSGGGGSGGGGSGGGGSDIVMTQTPLSLSVTPGEPASISCRSSQSLLHSNGYNYLDWYLQKPGQSPQLLIYLGSYRASGVPDRFSGSGSGTDFTLKISRVEAEDVGVYYCMQALQTPFTFGPGTKVDIKSGGGGSEVQLVESGGGLVQPGGSLKLSCAASGFTFNKYAMNWVRQAPGKGLEWVARIRSKYNNYATYYADSVKDRFTISRDDSKNTAYLQMNNLKTEDTAVYYCVRHGNFGNSYISYWAYWGQGTLVTVSSGGGGSGGGGSGGGGSQTVVTQEPSLTVSPGGTVTLTCGSSTGAVTSGNYPNWVQQKPGQAPRGLIGGTKFLAPGTPARFSGSLLGGKAALTLSGVQPEDEAEYYCVLWYSNRWVFGGGTKLTVLGGGGSQRFVTGHFGGLHPANGHHHHHH

SEQ ID NO: 357 - protein, 546 aa, Artificial Sequence
  Synthetic polypeptide
QRFVTGHFGGLYPANGGGGGSQVQLVQSGAEVKKPGASVKVSCKASGYTFTYYGISWVRQAPGQGLEWMGWINPYTGKTNYAQKLQGRVTMTTDTSTSTAYMELRSLRSDDTAVYYCARGSGGFDYWGQGTLVTVSSGGGGSGGGGSGGGGSDIVMTQTPLSLSVTPGEPASISCRSSQSLLHSNGYNYLDWYLQKPGQSPQLLIYLGSYRASGVPDRFSGSGSGTDFTLKISRVEAEDVGVYYCMQALQTPFTFGPGTKVDIKSGGGGSEVQLVESGGGLVQPGGSLKLSCAASGFTFNKYAMNWVRQAPGKGLEWVARIRSKYNNYATYYADSVKDRFTISRDDSKNTAYLQMNNLKTEDTAVYYCVRHGNFGNSYISYWAYWGQGTLVTVSSGGGGSGGGGSGGGGSQTVVTQEPSLTVSPGGTVTLTCGSSTGAVTSGNYPNWVQQKPGQAPRGLIGGTKFLAPGTPARFSGSLLGGKAALTLSGVQPEDEAEYYCVLWYSNRWVFGGGTKLTVLGGGGSQRFVTGHFGGLHPANGHHHHHH

SEQ ID NO: 358 - protein, 546 aa, Artificial Sequence
  Synthetic polypeptide
QRFVTGHFGGLYPANGGGGGSQVQLVQSGAEVKKPGASVKVSCKASGYTFTYYGISWVRQAPGQGLEWMGWINPYTGKTNYAQKLQGRVTMTTDTSTSTAYMELRSLRSDDTAVYYCARGSGGFDYWGQGTLVTVSSGGGGSGGGGSGGGGSDIVMTQTPLSLSVTPGEPASISCRSSQSLLHSVGYNYLDWYLQKPGQSPQLLIYLGSYRASGVPDRFSGSGSGTDFTLKISRVEAEDVGVYYCMQALQTPFTFGPGTKVDIKSGGGGSEVQLVESGGGLVQPGGSLKLSCAASGFTFNKYAMNWVRQAPGKGLEWVARIRSKYNNYATYYADSVKDRFTISRDDSKNTAYLQMNNLKTEDTAVYYCVRHGNFGNSYISYWAYWGQGTLVTVSSGGGGSGGGGSGGGGSQTVVTQEPSLTVSPGGTVTLTCGSSTGAVTSGNYPNWVQQKPGQAPRGLIGGTKFLAPGTPARFSGSLLGGKAALTLSGVQPEDEAEYYCVLWYSNRWVFGGGTKLTVLGGGGSQRFVTGHFGGLHPANGHHHHHH

SEQ ID NO: 359 - protein, 546 aa, Artificial Sequence
  Synthetic polypeptide
QRFVTGHFGGLYPANGGGGGSQVQLVQSGAEVKKPGASVKVSCKASGYTFTSYGISWVRQAPGQGLEWMGWINPYTGNRNYAQKVQDRVTMTTDTSTNTAYMELSSLRSDDTAVYYCARGSGGFDYWGQGTLVTVSSGGGGSGGGGSGGGGSDIVMTQSPLSLPVTLGQPASISCRSSQSLLHSVGYNYLDWYLQKPGQSPQLLIYLGSNRASGVPDRFSGSGSGTDFTLKISRVEAEDVGVYYCMQALQTPFTFGPGTKLEIKSGGGGSEVQLVESGGGLVQPGGSLKLSCAASGFTFNKYAMNWVRQAPGKGLEWVARIRSKYNNYATYYADSVKDRFTISRDDSKNTAYLQMNNLKTEDTAVYYCVRHGNFGNSYISYWAYWGQGTLVTVSSGGGGSGGGGSGGGGSQTVVTQEPSLTVSPGGTVTLTCGSSTGAVTSGNYPNWVQQKPGQAPRGLIGGTKFLAPGTPARFSGSLLGGKAALTLSGVQPEDEAEYYCVLWYSNRWVFGGGTKLTVLGGGGSQRFVTGHFGGLHPANGHHHHHH

SEQ ID NO: 360 - protein, 546 aa, Artificial Sequence
  Synthetic polypeptide
QRFVTGHFGGLYPANGGGGGSQVQLVQSGAEVKKPGASVKVSCKASGYTFTYYGISWVRQAPGQGLEWMGWINPYTGKTNYAQKLQDRVTMTTDTSTNTAYMELRSLRSDDTAVYYCARGSGGFDYWGQGTLVTVSSGGGGSGGGGSGGGGSDIVMTQTPLSLPVTPGEPASISCRSSQSLLHSVGYNYLDWYLQKPGQSPQLLIYLGSNRASGVPDRFSGSGSGTDFTLKISRVEAEDVGVYYCMQALQTPFTFGPGTKVDIKSGGGGSEVQLVESGGGLVQPGGSLKLSCAASGFTFNKYAMNWVRQAPGKGLEWVARIRSKYNNYATYYADSVKDRFTISRDDSKNTAYLQMNNLKTEDTAVYYCVRHGNFGNSYISYWAYWGQGTLVTVSSGGGGSGGGGSGGGGSQTVVTQEPSLTVSPGGTVTLTCGSSTGAVTSGNYPNWVQQKPGQAPRGLIGGTKFLAPGTPARFSGSLLGGKAALTLSGVQPEDEAEYYCVLWYSNRWVFGGGTKLTVLGGGGSQRFVTGHFGGLHPANGHHHHHH

SEQ ID NO: 361 - protein, 546 aa, Artificial Sequence
  Synthetic polypeptide
QRFVTGHFGGLYPANGGGGGSQVQLVQSGAEVKKPGASVKVSCKASGYTFTTYGISWVRQAPGQGLEWMGWINPYTGKTNYAQKLQGRVTMATDTSTSTAYMELRSLRSDDTAVYYCARGSGGFDYWGQGTLVTVSSGGGGSGGGGSGGGGSDIVMTQSPLSLPVTPGEPASISCRSSQSLLHSVGYNYLDWYLQKPGQSPQLLIYLGSNRASGVPDRFSGSGSGTDFTLKISRVEAEDVGVYYCMQALQTPFTFGPGTKLEIKSGGGGSEVQLVESGGGLVQPGGSLKLSCAASGFTFNKYAMNWVRQAPGKGLEWVARIRSKYNNYATYYADSVKDRFTISRDDSKNTAYLQMNNLKTEDTAVYYCVRHGNFGNSYISYWAYWGQGTLVTVSSGGGGSGGGGSGGGGSQTVVTQEPSLTVSPGGTVTLTCGSSTGAVTSGNYPNWVQQKPGQAPRGLIGGTKFLAPGTPARFSGSLLGGKAALTLSGVQPEDEAEYYCVLWYSNRWVFGGGTKLTVLGGGGSQRFVTGHFGGLHPANGHHHHHH

SEQ ID NO: 362 - protein, 546 aa, Artificial Sequence
  Synthetic polypeptide
QRFVTGHFGGLYPANGGGGGSQVQLVQSGAEVKEPGASVKVSCKASGYTFTYYGISWVRQAPGQGLEWMGWINPYTGNRNYAQKVQDRVTMTTDTSTNTAYMELRSLRSDDTAVYYCARGSGGFDYWGQGTLVTVSSGGGGSGGGGSGGGGSDIVMTQSPLSLPVTPGEPASISCRSSQSLLHSVGYNYLDWYLQKPGQSPQLLIYLGSNRASGVPDRFSGSGSGTDFTLKISRVEAEDVGVYYCMQALQTPFTFGPGTKLEIKSGGGGSEVQLVESGGGLVQPGGSLKLSCAASGFTFNKYAMNWVRQAPGKGLEWVARIRSKYNNYATYYADSVKDRFTISRDDSKNTAYLQMNNLKTEDTAVYYCVRHGNFGNSYISYWAYWGQGTLVTVSSGGGGSGGGGSGGGGSQTVVTQEPSLTVSPGGTVTLTCGSSTGAVTSGNYPNWVQQKPGQAPRGLIGGTKFLAPGTPARFSGSLLGGKAALTLSGVQPEDEAEYYCVLWYSNRWVFGGGTKLTVLGGGGSQRFVTGHFGGLHPANGHHHHHH

SEQ ID NO: 363 - protein, 546 aa, Artificial Sequence
  Synthetic polypeptide
QRFVTGHFGGLYPANGGGGGSQVQLVQSGAEVKKPGASVKVSCKASGYTFTYYGISWVRQAPGQGLEWMGWINPYTGKTNYAQKLQGRVTMTTDTSTSTAYMELRSLRSDDTAVYYCARGSGGFDYWGQGTLVTVSSGGGGSGGGGSGGGGSDIVMTQSPLSLPVTPGEPASISCRSSQSLLHSVGYNYLDWYLQKPGQSPQLLIYLGSNRASGVPDRFSGSGSGTDFTLKISRVEAEDVGVYYCMQALQTPFTFGPGTKVEIKSGGGGSEVQLVESGGGLVQPGGSLKLSCAASGFTFNKYAMNWVRQAPGKGLEWVARIRSKYNNYATYYADSVKDRFTISRDDSKNTAYLQMNNLKTEDTAVYYCVRHGNFGNSYISYWAYWGQGTLVTVSSGGGGSGGGGSGGGGSQTVVTQEPSLTVSPGGTVTLTCGSSTGAVTSGNYPNWVQQKPGQAPRGLIGGTKFLAPGTPARFSGSLLGGKAALTLSGVQPEDEAEYYCVLWYSNRWVFGGGTKLTVLGGGGSQRFVTGHFGGLHPANGHHHHHH

SEQ ID NO: 364 - protein, 546 aa, Artificial Sequence
  Synthetic polypeptide
QRFVTGHFGGLYPANGGGGGSQVQLVQSGAEVKKPGASVKVSCKASGYTFTSYGITWVRQAPGQGLEWMGWINPYTGNRNYAQKVQGRVTMTTDTSTSTAYMELRSLRSDDTAVYYCARGSGGFDYWGQGTLVTVSSGGGGSGGGGSGGGGSDIVMTQSPLSLSVTPGEPASISCRSSQSLLHSVGYNYLDWYLQKPGQSPQLLIYLGSNRASGVPDRFSGSGSGTDFTLKISRVEAEDVGVYYCMQALQTPFTFGPGTKVDIKSGGGGSEVQLVESGGGLVQPGGSLKLSCAASGFTFNKYAMNWVRQAPGKGLEWVARIRSKYNNYATYYADSVKDRFTISRDDSKNTAYLQMNNLKTEDTAVYYCVRHGNFGNSYISYWAYWGQGTLVTVSSGGGGSGGGGSGGGGSQTVVTQEPSLTVSPGGTVTLTCGSSTGAVTSGNYPNWVQQKPGQAPRGLIGGTKFLAPGTPARFSGSLLGGKAALTLSGVQPEDEAEYYCVLWYSNRWVFGGGTKLTVLGGGGSQRFVTGHFGGLHPANGHHHHHH

SEQ ID NO: 365 - protein, 546 aa, Artificial Sequence
  Synthetic polypeptide
QRFVTGHFGGLYPANGGGGGSQVQLVQSGAEVKKPGASVKVSCKASGYTFTSYGISWVRQAPGQGLEWMGWINPYTGNRNYAQKFQGRVTMTTDTSTNTAYMELSSLRSEDTAVYYCARGSGGFDYWGQGTLVTVSSGGGGSGGGGSGGGGSDIVMTQSPLSLPVTPGEPASISCRSSQSLLHSVGYNYLDWYLQKPGQSPQLLIYLGSNRASGVPDRFSGSGSGTDFTLKISRVEAEDVGVYYCMQALQTPFTFGPGTKVDIKSGGGGSEVQLVESGGGLVQPGGSLKLSCAASGFTFNKYAMNWVRQAPGKGLEWVARIRSKYNNYATYYADSVKDRFTISRDDSKNTAYLQMNNLKTEDTAVYYCVRHGNFGNSYISYWAYWGQGTLVTVSSGGGGSGGGGSGGGGSQTVVTQEPSLTVSPGGTVTLTCGSSTGAVTSGNYPNWVQQKPGQAPRGLIGGTKFLAPGTPARFSGSLLGGKAALTLSGVQPEDEAEYYCVLWYSNRWVFGGGTKLTVLGGGGSQRFVTGHFGGLHPANGHHHHHH

SEQ ID NO: 366 - protein, 546 aa, Artificial Sequence
  Synthetic polypeptide
QRFVTGHFGGLYPANGGGGGSQVQLVQSGAEVKKPGASVKVSCKASGYSFTSYGISWVRQAPGQGLEWMGWINPYTGNRNYAQKVQGRVTMTTDTSTSTAYMELRSLRSDDTAVYYCARGSGGFDYWGQGTLVTVSSGGGGSGGGGSGGGGSDIVMTQSPLSLPVTPGEPASISCRSSQSLLHSVGYNYLDWYLQKPGQSPQLLIYLGSNRASGVPDRFSGSGSGTDFTLKISRVEAEDVGVYYCMQALQTPFTFGPGTKVEIKSGGGGSEVQLVESGGGLVQPGGSLKLSCAASGFTFNKYAMNWVRQAPGKGLEWVARIRSKYNNYATYYADSVKDRFTISRDDSKNTAYLQMNNLKTEDTAVYYCVRHGNFGNSYISYWAYWGQGTLVTVSSGGGGSGGGGSGGGGSQTVVTQEPSLTVSPGGTVTLTCGSSTGAVTSGNYPNWVQQKPGQAPRGLIGGTKFLAPGTPARFSGSLLGGKAALTLSGVQPEDEAEYYCVLWYSNRWVFGGGTKLTVLGGGGSQRFVTGHFGGLHPANGHHHHHH

SEQ ID NO: 367 - protein, 546 aa, Artificial Sequence
  Synthetic polypeptide
QRFVTGHFGGLYPANGGGGGSQVQLVQSGAEVKKPGASVKVSCKASGYTFTYYGISWVRQAPGQGLEWMGWINPYTGKTNYAQKVQGRVTMTTDTSTSTAYMELRNLRSDDTAVYYCARGSGGFDYWGQGTLVTVSSGGGGSGGGGSGGGGSDIVMTQTPLSLSVTPGQPASISCRSSQSLLHSVGYNYLDWYLQKPGQSPQLLIYLGSNRASGVPDRFSGSGSGTDFTLKISRVEAEDVGVYYCMQALQTPFTFGPGTKVDIKSGGGGSEVQLVESGGGLVQPGGSLKLSCAASGFTFNKYAMNWVRQAPGKGLEWVARIRSKYNNYATYYADSVKDRFTISRDDSKNTAYLQMNNLKTEDTAVYYCVRHGNFGNSYISYWAYWGQGTLVTVSSGGGGSGGGGSGGGGSQTVVTQEPSLTVSPGGTVTLTCGSSTGAVTSGNYPNWVQQKPGQAPRGLIGGTKFLAPGTPARFSGSLLGGKAALTLSGVQPEDEAEYYCVLWYSNRWVFGGGTKLTVLGGGGSQRFVTGHFGGLHPANGHHHHHH

SEQ ID NO: 368 - protein, 546 aa, Artificial Sequence
  Synthetic polypeptide
QRFVTGHFGGLYPANGGGGGSQVQLVQSGAEVKKPGASVKVSCKASGYTFTYYGISWVRQAPGQGLEWMGWINPYTGKTNYAQKLQGRVTMTTDTSTSTAYMELRSLRSDDTAVYYCARGSGGFDYWGQGTLVTVSSGGGGSGGGGSGGGGSDIVMTQTPLSLSVTPGQPASISCRSSQSLLHSVGYNYLDWYLQKPGQSPQLLIYLGSNRASGVPDRFSGSGSGTDFTLKISRVEAEDVGVYYCMQALQTPFTFGPGTKVDIKSGGGGSEVQLVESGGGLVQPGGSLKLSCAASGFTFNKYAMNWVRQAPGKGLEWVARIRSKYNNYATYYADSVKDRFTISRDDSKNTAYLQMNNLKTEDTAVYYCVRHGNFGNSYISYWAYWGQGTLVTVSSGGGGSGGGGSGGGGSQTVVTQEPSLTVSPGGTVTLTCGSSTGAVTSGNYPNWVQQKPGQAPRGLIGGTKFLAPGTPARFSGSLLGGKAALTLSGVQPEDEAEYYCVLWYSNRWVFGGGTKLTVLGGGGSQRFVTGHFGGLHPANGHHHHHH

SEQ ID NO: 369 - protein, 550 aa, Artificial Sequence
  Synthetic polypeptide
QRFVTGHFGGLYPANGGGGGSQVQLVESGGGVVQPGRSLRLSCAASGFTFRNYAMHWVRQAPGKGLEWVAVISYSGNNKYYASSVKGRFTISRDNSKNTLYLQLNSLRAEDTAVYYCAREFYYDSTGYDYSTPGDYWGQGTLVTVSSGGGGSGGGGSGGGGSDIQMTQSPSSLSASVGDRVTITCQASQDISNYLNWYQQKPGKAPKLLIYDASNLETGVPSRFSGSGSGTDFTFTISSLQPEDIATYYCQQYDNLPTFGQGTRLEIKSGGGGSEVQLVESGGGLVQPGGSLKLSCAASGFTFNKYAMNWVRQAPGKGLEWVARIRSKYNNYATYYADSVKDRFTISRDDSKNTAYLQMNNLKTEDTAVYYCVRHGNFGNSYISYWAYWGQGTLVTVSSGGGGSGGGGSGGGGSQTVVTQEPSLTVSPGGTVTLTCGSSTGAVTSGNYPNWVQQKPGQAPRGLIGGTKFLAPGTPARFSGSLLGGKAALTLSGVQPEDEAEYYCVLWYSNRWVFGGGTKLTVLGGGGSQRFVTGHFGGLHPANGHHHHHH

SEQ ID NO: 370 - protein, 551 aa, Artificial Sequence
  Synthetic polypeptide
QRFVTGHFGGLYPANGGGGGSQVQLVESGGGVVQPGRSLRLSCVASGFTFRNYAMHWVRQAPGKGLEWVAVISYSGNNKYYASSVKGRFTISRDNSKNTLYLQLNSLRAEDTAVYYCAREFYYDSTGYDYSTPGDYWGQGTLVTVSSGGGGSGGGGSGGGGSDIQMTQSPSSLSASVGDRVTITCRASQSISSYLNWYQQKPGKAPKLLIYDASSLQSGVPSRFSGSGSGTEFTLTISSLQAEDVAVYYCQQYYSTPLTFGGGTKVDIKSGGGGSEVQLVESGGGLVQPGGSLKLSCAASGFTFNKYAMNWVRQAPGKGLEWVARIRSKYNNYATYYADSVKDRFTISRDDSKNTAYLQMNNLKTEDTAVYYCVRHGNFGNSYISYWAYWGQGTLVTVSSGGGGSGGGGSGGGGSQTVVTQEPSLTVSPGGTVTLTCGSSTGAVTSGNYPNWVQQKPGQAPRGLIGGTKFLAPGTPARFSGSLLGGKAALTLSGVQPEDEAEYYCVLWYSNRWVFGGGTKLTVLGGGGSQRFVTGHFGGLHPANGHHHHHH

SEQ ID NO: 371 - protein, 551 aa, Artificial Sequence
  Synthetic polypeptide
QRFVTGHFGGLYPANGGGGGSQVQLVESGGGVVQPGRSLRLSCAASGFTFRNYAMHWVRQAPGKGLEWVAGISYSGTNKYYASSVKGRFTISRDNSKNTLYLQLNSLRAEDTAVYYCAREFYYDSTGYDYSTPGDYWGQGTLVTVSSGGGGSGGGGSGGGGSDIQMTQSPSSLSASVGDRVTITCQASQDISNYLNWYQQKPGKAPKLLIYDASNLETGVPSRFSGSGSGTEFTLTISSLQPEDIATYYCQQYDNLPLTFGGGTKVDIKSGGGGSEVQLVESGGGLVQPGGSLKLSCAASGFTFNKYAMNWVRQAPGKGLEWVARIRSKYNNYATYYADSVKDRFTISRDDSKNTAYLQMNNLKTEDTAVYYCVRHGNFGNSYISYWAYWGQGTLVTVSSGGGGSGGGGSGGGGSQTVVTQEPSLTVSPGGTVTLTCGSSTGAVTSGNYPNWVQQKPGQAPRGLIGGTKFLAPGTPARFSGSLLGGKAALTLSGVQPEDEAEYYCVLWYSNRWVFGGGTKLTVLGGGGSQRFVTGHFGGLHPANGHHHHHH

SEQ ID NO: 372 - protein, 551 aa, Artificial Sequence
  Synthetic polypeptide
QRFVTGHFGGLYPANGGGGGSQVQLVESGGGVVQPGRSLRLSCVASGFTFRNYAMHWVRQAPGKGLEWVAVISYSGNNKYYASSVKGRFTISRDNSKNTLFLQLNSLRAEDTAVYYCAREFYYDSTGYDYSTPGNYWGQGTLVTVSSGGGGSGGGGSGGGGSDIQMTQSPSSLSASVGDRVTITCQASQDISNYLNWYQQKPGKAPKLLIYDASNLETGVPSRFSGSGSGTDFTFTISSLQPEDIATYYCQQYVNLPLTFGGGTKLEIKSGGGGSEVQLVESGGGLVQPGGSLKLSCAASGFTFNKYAMNWVRQAPGKGLEWVARIRSKYNNYATYYADSVKDRFTISRDDSKNTAYLQMNNLKTEDTAVYYCVRHGNFGNSYISYWAYWGQGTLVTVSSGGGGSGGGGSGGGGSQTVVTQEPSLTVSPGGTVTLTCGSSTGAVTSGNYPNWVQQKPGQAPRGLIGGTKFLAPGTPARFSGSLLGGKAALTLSGVQPEDEAEYYCVLWYSNRWVFGGGTKLTVLGGGGSQRFVTGHFGGLHPANGHHHHHH

SEQ ID NO: 373 - protein, 548 aa, Artificial Sequence
  Synthetic polypeptide
QRFVTGHFGGLYPANGGGGGSQVQLVESGGGVVQPGRSLRLSCAASGFTFSSYGMQWVRQAPGKGLEWVAVIWYSGSNKYYASSVKGRFTISRDNSKNTLYLQMNSLRAEDTAVYYCARDGYPIFYRYYGMDVWGQGTTVTVSSGGGGSGGGGSGGGGSDIQMTQSPSSLSASVGDRVTITCRASQGISNYLAWYQQKPGKVPKLLIYAASTLQSGVPSRFSGSGSGTDFTLTISSLQPEDVATYYCQKYNSAPLTFGGGTKVEIKSGGGGSEVQLVESGGGLVQPGGSLKLSCAASGFTFNKYAMNWVRQAPGKGLEWVARIRSKYNNYATYYADSVKDRFTISRDDSKNTAYLQMNNLKTEDTAVYYCVRHGNFGNSYISYWAYWGQGTLVTVSSGGGGSGGGGSGGGGSQTVVTQEPSLTVSPGGTVTLTCGSSTGAVTSGNYPNWVQQKPGQAPRGLIGGTKFLAPGTPARFSGSLLGGKAALTLSGVQPEDEAEYYCVLWYSNRWVFGGGTKLTVLGGGGSQRFVTGHFGGLHPANGHHHHHH

SEQ ID NO: 374 - protein, 549 aa, Artificial Sequence
  Synthetic polypeptide
QRFVTGHFGGLYPANGGGGGSQVQLVESGGGVVQPGRSLRLSCAASGFTFSSYGMHWVRQAPGKGLEWVAVISYSGSNKYYASSVKGRFTISRDNSKNTLYLQMNSLRAEDTAVYYCARDGYPIFYRYYGMDVWGQGTTVTVSSGGGGSGGGGSGGGGSEIVLTQSPGTLSLSPGERATLSCRASQSVSSSYLAWYQQKPGQAPRLLIYGASSRATGIPDRFSGSGSGTDFTLTISRLEPEDLAVYYCQQYGTSPLTFGGGTKLEIKSGGGGSEVQLVESGGGLVQPGGSLKLSCAASGFTFNKYAMNWVRQAPGKGLEWVARIRSKYNNYATYYADSVKDRFTISRDDSKNTAYLQMNNLKTEDTAVYYCVRHGNFGNSYISYWAYWGQGTLVTVSSGGGGSGGGGSGGGGSQTVVTQEPSLTVSPGGTVTLTCGSSTGAVTSGNYPNWVQQKPGQAPRGLIGGTKFLAPGTPARFSGSLLGGKAALTLSGVQPEDEAEYYCVLWYSNRWVFGGGTKLTVLGGGGSQRFVTGHFGGLHPANGHHHHHH

SEQ ID NO: 375 - protein, 549 aa, Artificial Sequence
  Synthetic polypeptide
QRFVTGHFGGLYPANGGGGGSQVQLVESGGGVVQPGRSLRLSCAASGFTFSSFGMHWVRQAPGKGLEWVAFIWYSGSNKYYASSVKGRVTISRDNSKNTLYLQMNSLRAEDTAVYYCARDGYPIFYYYYGMDVWGQGTTVTVSSGGGGSGGGGSGGGGSEIVLTQSPGTLSLSPGERATLSCRASQSVSSSYLAWYQQKPGQAPRLLIYGASSRATGIPDRFSGSGSGTDFTLTISRLEPEDFAVYYCQQYGSSPFTFGPGTRLEIKSGGGGSEVQLVESGGGLVQPGGSLKLSCAASGFTFNKYAMNWVRQAPGKGLEWVARIRSKYNNYATYYADSVKDRFTISRDDSKNTAYLQMNNLKTEDTAVYYCVRHGNFGNSYISYWAYWGQGTLVTVSSGGGGSGGGGSGGGGSQTVVTQEPSLTVSPGGTVTLTCGSSTGAVTSGNYPNWVQQKPGQAPRGLIGGTKFLAPGTPARFSGSLLGGKAALTLSGVQPEDEAEYYCVLWYSNRWVFGGGTKLTVLGGGGSQRFVTGHFGGLHPANGHHHHHH

SEQ ID NO: 376 - protein, 574 aa, Artificial Sequence
  Synthetic polypeptide
QRFVTGHFGGLHPANGGGGGSQVQLVESGGGVVQPGGSLRLSCAASGFTFSSYGMHWVRQAPGKGLEWVAFIWYDGSNKYYADSVKGRFTISRDNSKNTLYLQMNSLRAEDTAVYYCARRAGIIGTIGYYYGMDVWGQGTTVTVSSGGGGSGGGGSGGGGSSYELTQPPSVSVSPGQTASITCSGDRLGEKYTSWYQQRPGQSPLLVIYQDTKRPSGIPERFSGSNSGNTATLTISGTQAMDEADYYCQAWESSTVVFGGGTKLTVLSGGGGSEVQLVESGGGLVQPGGSLKLSCAASGFTFNKYAMNWVRQAPGKGLEWVARIRSKYNNYATYYADSVKDRFTISRDDSKNTAYLQMNNLKTEDTAVYYCVRHGNFGNSYISYWAYWGQGTLVTVSSGGGGSGGGGSGGGGSQTVVTQEPSLTVSPGGTVTLTCGSSTGAVTSGNYPNWVQQKPGQAPRGLIGGTKFLAPGTPARFSGSLLGGKAALTLSGVQPEDEAEYYCVLWYSNRWVFGGGTKLTVLGGGGSQRFCTGHFGGLHPCNGGGGGSGGGSRDWDFDVFGGGTPVGGHHHHHH

SEQ ID NO: 377 - protein, 571 aa, Artificial Sequence
  Synthetic polypeptide
QRFVTGHFGGLHPANGGGGGSQVQLQESGPGLVKPSQTLSLTCTVSGGSISRGGYYWSWIRQHPGKGLEWIGYIFYRGRTYYNPSLKSRVTISVDTSKNQFSLKLSSVTAADTAVYYCARVNSNYGWFDPWGQGTLVTVSSGGGGSGGGGSGGGGSEIVLTQFPGTLSLSPGERATLSCRASQSVSSSYLAWYQQKPGQAPRLLIYGASSRATGIPDRFSGSGSGTDFTLTISRLEPEDFAVYYCQQYGSSPLTFGGGTKLEIKSGGGGSEVQLVESGGGLVQPGGSLKLSCAASGFTFNKYAMNWVRQAPGKGLEWVARIRSKYNNYATYYADSVKDRFTISRDDSKNTAYLQMNNLKTEDTAVYYCVRHGNFGNSYISYWAYWGQGTLVTVSSGGGGSGGGGSGGGGSQTVVTQEPSLTVSPGGTVTLTCGSSTGAVTSGNYPNWVQQKPGQAPRGLIGGTKFLAPGTPARFSGSLLGGKAALTLSGVQPEDEAEYYCVLWYSNRWVFGGGTKLTVLGGGGSQRFCTGHFGGLHPCNGGGGGSGGGSRDWDFDVFGGGTPVGGHHHHHH

SEQ ID NO: 378 - protein, 571 aa, Artificial Sequence
  Synthetic polypeptide
QRFVTGHFGGLHPANGGGGGSQVQLQESGPGLVKPSQTLSLTCTVSGGSISSGGYYWSWIRQHPGKGLEWIGYIFYRGRTYYNPSLKSRVTISVDTSKNQFSLKLSSVTAADTAVYYCARVYSNYGWFDPWGQGTLVTVSSGGGGSGGGGSGGGGSEIVLTQSPGTLSLSPGERATLSCRASQSVSSSYLAWYQQKPGQAPRLLIYGTSNRATGIPDRFSGSGSGTDFTLTISRLEPEDFAVYYCQQYGSSPLTFGGGTKLEIKSGGGGSEVQLVESGGGLVQPGGSLKLSCAASGFTFNKYAMNWVRQAPGKGLEWVARIRSKYNNYATYYADSVKDRFTISRDDSKNTAYLQMNNLKTEDTAVYYCVRHGNFGNSYISYWAYWGQGTLVTVSSGGGGSGGGGSGGGGSQTVVTQEPSLTVSPGGTVTLTCGSSTGAVTSGNYPNWVQQKPGQAPRGLIGGTKFLAPGTPARFSGSLLGGKAALTLSGVQPEDEAEYYCVLWYSNRWVFGGGTKLTVLGGGGSQRFCTGHFGGLHPCNGGGGGSGGGSRDWDFDVFGGGTPVGGHHHHHH

SEQ ID NO: 379 - protein, 571 aa, Artificial Sequence
  Synthetic polypeptide
QRFVTGHFGGLHPANGGGGGSQVQLQESGPGLVKPSQTLSLTCTVSGGSISSGGYYWSWIRQHPGKGLEWIGYIFYSGRTYYNPSLKSRVTISVDTSKNQFSLKLSSVTAADTAVYYCARVYSNYGWFDPWGQGTLVTVSSGGGGSGGGGSGGGGSEIVLTQSPGTLSLSPGERATLSCRASQSVSSSYLAWYQQKPGQAPRLLIYGASSRATGIPDRFSGSGSGTDFTLTISRLEPEDFAVYYCQQYGSSPLTFGGGTKLEIKSGGGGSEVQLVESGGGLVQPGGSLKLSCAASGFTFNKYAMNWVRQAPGKGLEWVARIRSKYNNYATYYADSVKDRFTISRDDSKNTAYLQMNNLKTEDTAVYYCVRHGNFGNSYISYWAYWGQGTLVTVSSGGGGSGGGGSGGGGSQTVVTQEPSLTVSPGGTVTLTCGSSTGAVTSGNYPNWVQQKPGQAPRGLIGGTKFLAPGTPARFSGSLLGGKAALTLSGVQPEDEAEYYCVLWYSNRWVFGGGTKLTVLGGGGSQRFCTGHFGGLHPCNGGGGGSGGGSRDWDFDVFGGGTPVGGHHHHHH

SEQ ID NO: 380 - protein, 571 aa, Artificial Sequence
  Synthetic polypeptide
QRFVTGHFGGLHPANGGGGGSQVQLQESGPGLVKPSQTLSLTCTVSGGSISSGGYYWSWIRQHPGKGLEWIGYIFYSGRTYYNPSLKSRVTISVDTSKNQFSLKLRSVTAADTAVYYCARVYSNYGWFDPWGQGTLVTVSSGGGGSGGGGSGGGGSEIVLTQSPGTLSLSPGERATLSCRASQSVSSSYLAWYQQKPGQAPRLLIYGASSRATGIPDRFSGSGSGTDFTLTISRLEPEDFAVYYCQQYGSSPLTFGGGTKLEIKSGGGGSEVQLVESGGGLVQPGGSLKLSCAASGFTFNKYAMNWVRQAPGKGLEWVARIRSKYNNYATYYADSVKDRFTISRDDSKNTAYLQMNNLKTEDTAVYYCVRHGNFGNSYISYWAYWGQGTLVTVSSGGGGSGGGGSGGGGSQTVVTQEPSLTVSPGGTVTLTCGSSTGAVTSGNYPNWVQQKPGQAPRGLIGGTKFLAPGTPARFSGSLLGGKAALTLSGVQPEDEAEYYCVLWYSNRWVFGGGTKLTVLGGGGSQRFCTGHFGGLHPCNGGGGGSGGGSRDWDFDVFGGGTPVGGHHHHHH

SEQ ID NO: 381 - protein, 571 aa, Artificial Sequence
  Synthetic polypeptide
QRFVTGHFGGLHPANGGGGGSQVQLQESGPGLVKPSQTLSLTCTVSGGSISSGGYYWSWIRQHPGKGLEWIGYIYYSGSTFYNPSLRSRVTISVDTSKNQFSLKLSSVTAADTAVYYCARDSSSSRALDYWGQGTLVTVSSGGGGSGGGGSGGGGSEIVLTQSPGTLSLSPGERATLSCRASQSVSSSYLAWYQQKPGQAPRLLIYGASSRATGIPDRFSGSGSGTDFTLTISRLEPEDFAVYYCQQYDSSPRTFGQGTKLEIKSGGGGSEVQLVESGGGLVQPGGSLKLSCAASGFTFNKYAMNWVRQAPGKGLEWVARIRSKYNNYATYYADSVKDRFTISRDDSKNTAYLQMNNLKTEDTAVYYCVRHGNFGNSYISYWAYWGQGTLVTVSSGGGGSGGGGSGGGGSQTVVTQEPSLTVSPGGTVTLTCGSSTGAVTSGNYPNWVQQKPGQAPRGLIGGTKFLAPGTPARFSGSLLGGKAALTLSGVQPEDEAEYYCVLWYSNRWVFGGGTKLTVLGGGGSQRFCTGHFGGLHPCNGGGGGSGGGSRDWDFDVFGGGTPVGGHHHHHH

SEQ ID NO: 382 - protein, 571 aa, Artificial Sequence
  Synthetic polypeptide
QRFVTGHFGGLHPANGGGGGSQVQLQESGPGLVKPSQTLSLTCTVSGGSISSGGYYWSWIRQHPGKGLEWIGYIYYRGRTYYNPSLKSRVTISVDTSKNQFSLKLSSVTAADTAVYYCARVYSNYGWFDPWGQGTLVTVSSGGGGSGGGGSGGGGSEIVLTQSPGTLSLSPGERATLSCRASQSVSSSYLAWYQQKPGQAPRLLIYGASSRATGIPDRFSGSGSGTDFTLTISRLEPEDFAVYYCQQYGSSPLTFGGGTKLEIKSGGGGSEVQLVESGGGLVQPGGSLKLSCAASGFTFNKYAMNWVRQAPGKGLEWVARIRSKYNNYATYYADSVKDRFTISRDDSKNTAYLQMNNLKTEDTAVYYCVRHGNFGNSYISYWAYWGQGTLVTVSSGGGGSGGGGSGGGGSQTVVTQEPSLTVSPGGTVTLTCGSSTGAVTSGNYPNWVQQKPGQAPRGLIGGTKFLAPGTPARFSGSLLGGKAALTLSGVQPEDEAEYYCVLWYSNRWVFGGGTKLTVLGGGGSQRFCTGHFGGLHPCNGGGGGSGGGSRDWDFDVFGGGTPVGGHHHHHH

SEQ ID NO: 383 - protein, 570 aa, Artificial Sequence
  Synthetic polypeptide
QRFVTGHFGGLHPANGGGGGSQVQLQESGPGLVKPSETLSLTCTVSGGSISSGGYYWSWIRQHPGKGLEWIGYIFYRGRTYYNPSLKSRVTISVDTSKNQFSLKLSSVTAADTAVYYCARVYSNYGWFDPWGQGTLVTVSSGGGGSGGGGSGGGGSEIVLTQSPGTLSLSPGERATLSCRASQSVSSSYLAWYQQKPGQAPRLLIYGASSRATGIPDRFSGSGSGTDFTLTISRLEPEDFAVYYCQQYGSSPTFGGGTKVEIKSGGGGSEVQLVESGGGLVQPGGSLKLSCAASGFTFNKYAMNWVRQAPGKGLEWVARIRSKYNNYATYYADSVKDRFTISRDDSKNTAYLQMNNLKTEDTAVYYCVRHGNFGNSYISYWAYWGQGTLVTVSSGGGGSGGGGSGGGGSQTVVTQEPSLTVSPGGTVTLTCGSSTGAVTSGNYPNWVQQKPGQAPRGLIGGTKFLAPGTPARFSGSLLGGKAALTLSGVQPEDEAEYYCVLWYSNRWVFGGGTKLTVLGGGGSQRFCTGHFGGLHPCNGGGGGSGGGSRDWDFDVFGGGTPVGGHHHHHH

SEQ ID NO: 384 - protein, 571 aa, Artificial Sequence
  Synthetic polypeptide
QRFVTGHFGGLHPANGGGGGSQVQLQESGPGLVKPSQTLSLTCTVSGGSISSGGYYWSWIRQHPGKGLEWIGYIFYRGRTYYNPSLKSRVTISVDTSKNQFSLKLSSVTAADTAVYYCARVYSNYGWFDPWGQGTLVTVSSGGGGSGGGGSGGGGSEIVLTQSPGTLSLSPGERATLSCRASQSVSSSYLAWYQQKPGQAPRLLIYGASSRATGIPDRFSGSGSGTDFTLTISRLEPEDFAVYYCQQYGSSPLTFGGGTKVEIKSGGGGSEVQLVESGGGLVQPGGSLKLSCAASGFTFNKYAMNWVRQAPGKGLEWVARIRSKYNNYATYYADSVKDRFTISRDDSKNTAYLQMNNLKTEDTAVYYCVRHGNFGNSYISYWAYWGQGTLVTVSSGGGGSGGGGSGGGGSQTVVTQEPSLTVSPGGTVTLTCGSSTGAVTSGNYPNWVQQKPGQAPRGLIGGTKFLAPGTPARFSGSLLGGKAALTLSGVQPEDEAEYYCVLWYSNRWVFGGGTKLTVLGGGGSQRFCTGHFGGLHPCNGGGGGSGGGSRDWDFDVFGGGTPVGGHHHHHH

SEQ ID NO: 385 - protein, 570 aa, Artificial Sequence
  Synthetic polypeptide
QRFVTGHFGGLHPANGGGGGSQVQLQESGPGLVKPSQTLSLTCTVSGGSISSGGYYWSWIRQHPGKGLEWIGYIYYRGRTYYNPSLKSRVTISVDTSKNQFSLKLSSVTAADTAVYYCARVYSNYGWFDPWGQGTLVTVSSGGGGSGGGGSGGGGSEIVLTQSPGTLSLSPGERATLSCRASQSVSSSYLAWYQQKPGQAPRLLIYGASSRATGIPDRFSGSGSGTDFTLTISRLEPEDFAVYYCQQYGSSPTFGPGTKVEIKSGGGGSEVQLVESGGGLVQPGGSLKLSCAASGFTFNKYAMNWVRQAPGKGLEWVARIRSKYNNYATYYADSVKDRFTISRDDSKNTAYLQMNNLKTEDTAVYYCVRHGNFGNSYISYWAYWGQGTLVTVSSGGGGSGGGGSGGGGSQTVVTQEPSLTVSPGGTVTLTCGSSTGAVTSGNYPNWVQQKPGQAPRGLIGGTKFLAPGTPARFSGSLLGGKAALTLSGVQPEDEAEYYCVLWYSNRWVFGGGTKLTVLGGGGSQRFCTGHFGGLHPCNGGGGGSGGGSRDWDFDVFGGGTPVGGHHHHHH

SEQ ID NO: 386 - protein, 570 aa, Artificial Sequence
  Synthetic polypeptide
QRFVTGHFGGLHPANGGGGGSQVQLQESGPGLVKPSQTLSLTCTVSGGSISSGGYYWSWIRQHPGKGLEWIGYIYYRGRTYYNPSLKSRVTISVDTSKNQFSLKLSSVTAADTAVYYCARVYSNYGWFDPWGQGTLVTVSSGGGGSGGGGSGGGGSEIVLTQSPGTLSLSPGERATLSCRASQSVSSSYLAWYQQKPGQAPRLLIYGASSRATGIPDRFSGSGSGTDFTLTISRLEPEDFAVYYCQQYGSSPTFGGGTKVEIKSGGGGSEVQLVESGGGLVQPGGSLKLSCAASGFTFNKYAMNWVRQAPGKGLEWVARIRSKYNNYATYYADSVKDRFTISRDDSKNTAYLQMNNLKTEDTAVYYCVRHGNFGNSYISYWAYWGQGTLVTVSSGGGGSGGGGSGGGGSQTVVTQEPSLTVSPGGTVTLTCGSSTGAVTSGNYPNWVQQKPGQAPRGLIGGTKFLAPGTPARFSGSLLGGKAALTLSGVQPEDEAEYYCVLWYSNRWVFGGGTKLTVLGGGGSQRFCTGHFGGLHPCNGGGGGSGGGSRDWDFDVFGGGTPVGGHHHHHH

SEQ ID NO: 387 - protein, 570 aa, Artificial Sequence
  Synthetic polypeptide
QRFVTGHFGGLHPANGGGGGSQVQLQESGPGLVKPSQTLSLTCTISGGSISSGGYYWSWIRQHPGKGLEWIGYIFYSGRTYYNPSLKSRVTISVDTSKNQFSLKLTSVTAADTAVYYCARVNSNYGWFDPWGQGTLVTVSSGGGGSGGGGSGGGGSEIVLTQSPGTLSLSPGERATLSCRASQSVSSSYLAWYQQKPGQAPRLLIYGASSRATGIPDRFSGSGSGTDFTLTISRLEPEDFAVYYCQQYGSSPTFGGGTKVEIKSGGGGSEVQLVESGGGLVQPGGSLKLSCAASGFTFNKYAMNWVRQAPGKGLEWVARIRSKYNNYATYYADSVKDRFTISRDDSKNTAYLQMNNLKTEDTAVYYCVRHGNFGNSYISYWAYWGQGTLVTVSSGGGGSGGGGSGGGGSQTVVTQEPSLTVSPGGTVTLTCGSSTGAVTSGNYPNWVQQKPGQAPRGLIGGTKFLAPGTPARFSGSLLGGKAALTLSGVQPEDEAEYYCVLWYSNRWVFGGGTKLTVLGGGGSQRFCTGHFGGLHPCNGGGGGSGGGSRDWDFDVFGGGTPVGGHHHHHH

SEQ ID NO: 388 - protein, 571 aa, Artificial Sequence
  Synthetic polypeptide
QRFVTGHFGGLHPANGGGGGSQVQLQESGPGLVKPSQTLSLTCTVSGGSISSGGYYWSWIRQHPGKGLDWIGYIFYRGRTYYNPSLKSRVTISVDTSKNQFSLKLSSVTAADTAVYYCARVNSNYGWFDPWGQGTLVTVSSGGGGSGGGGSGGGGSEIVLTQSPGTLSLSPGERATLSCRASQSVSSSYLAWYQQKPGQAPRLLIYGASSRATGIPDRFSGSGSGTDFTLTISRLEPEDFAVYYCQQYGSSPLTFGGGTKVEIKSGGGGSEVQLVESGGGLVQPGGSLKLSCAASGFTFNKYAMNWVRQAPGKGLEWVARIRSKYNNYATYYADSVKDRFTISRDDSKNTAYLQMNNLKTEDTAVYYCVRHGNFGNSYISYWAYWGQGTLVTVSSGGGGSGGGGSGGGGSQTVVTQEPSLTVSPGGTVTLTCGSSTGAVTSGNYPNWVQQKPGQAPRGLIGGTKFLAPGTPARFSGSLLGGKAALTLSGVQPEDEAEYYCVLWYSNRWVFGGGTKLTVLGGGGSQRFCTGHFGGLHPCNGGGGGSGGGSRDWDFDVFGGGTPVGGHHHHHH

SEQ ID NO: 389 - protein, 570 aa, Artificial Sequence
  Synthetic polypeptide
QRFVTGHFGGLHPANGGGGGSQVQLQESGPGLVKPSQTLSLTCTVSGGSISSGGYYWSWIRQHPGKGLEWIGYIYYRGRTYYNPSLKSRVTISVDTSKNQFSLKLSSVTAADTAVYYCARVYSNYGWFDPWGQGTLVTVSSGGGGSGGGGSGGGGSEIVLTQSPGTLSLSPGERATLSCRASQSVSSSYLAWYQQKPGQAPRLLIYGASTRATGIPDRFSGSGSGTDFTLTISRLEPEDFAVYYCQQYGSSPSFGQGTKVEIKSGGGGSEVQLVESGGGLVQPGGSLKLSCAASGFTFNKYAMNWVRQAPGKGLEWVARIRSKYNNYATYYADSVKDRFTISRDDSKNTAYLQMNNLKTEDTAVYYCVRHGNFGNSYISYWAYWGQGTLVTVSSGGGGSGGGGSGGGGSQTVVTQEPSLTVSPGGTVTLTCGSSTGAVTSGNYPNWVQQKPGQAPRGLIGGTKFLAPGTPARFSGSLLGGKAALTLSGVQPEDEAEYYCVLWYSNRWVFGGGTKLTVLGGGGSQRFCTGHFGGLHPCNGGGGGSGGGSRDWDFDVFGGGTPVGGHHHHHH

SEQ ID NO: 390 - protein, 571 aa, Artificial Sequence
  Synthetic polypeptide
QRFVTGHFGGLHPANGGGGGSQVQLQESGPGLVRPSQTLSLTCTVSGGSISSGGYYWSWIRQHPGKGLEWIGYIYYRGRTYYNPSLKSRVTISVDTSKNQFSLKLSSVTAADTAVYYCARVYSNYGWFDPWGQGTLVTVSSGGGGSGGGGSGGGGSEIVLTQSPGTLSLSPGERATLSCRASQSVSSSYLAWYQQKPGQAPRLLIYGASSRATGIPDRFSGSGSGTDFTLTISRLEPEDFAVYYCQQYDTSPLTFGGGTKVEIKSGGGGSEVQLVESGGGLVQPGGSLKLSCAASGFTFNKYAMNWVRQAPGKGLEWVARIRSKYNNYATYYADSVKDRFTISRDDSKNTAYLQMNNLKTEDTAVYYCVRHGNFGNSYISYWAYWGQGTLVTVSSGGGGSGGGGSGGGGSQTVVTQEPSLTVSPGGTVTLTCGSSTGAVTSGNYPNWVQQKPGQAPRGLIGGTKFLAPGTPARFSGSLLGGKAALTLSGVQPEDEAEYYCVLWYSNRWVFGGGTKLTVLGGGGSQRFCTGHFGGLHPCNGGGGGSGGGSRDWDFDVFGGGTPVGGHHHHHH

SEQ ID NO: 391 - protein, 570 aa, Artificial Sequence; identical to SEQ ID NO: 386
  Synthetic polypeptide

SEQ ID NO: 392 - protein, 571 aa, Artificial Sequence
  Synthetic polypeptide
QRFVTGHFGGLHPANGGGGGSQVQLQESGPGLVKPSQTLSLTCTVSGGSISSGGYYWSWIRQHPGKGLEWIGYIYYRGRTYYNPSLKSRVTISVDTSKNQFSLKLSSVTAADTAVYYCARVYSNYGWFDPWGQGTLVTVSSGGGGSGGGGSGGGGSEIVLTQSPGTLSLSPGERATLSCRASQSVSSSYLAWYQQKPGQAPRLLIYGASSRATGIPDRFSGSGSGTDFTLTISRLEPEDFAVYYCQQYGSSPLTFGGGTKVEIKSGGGGSEVQLVESGGGLVQPGGSLKLSCAASGFTFNKYAMNWVRQAPGKGLEWVARIRSKYNNYATYYADSVKDRFTISRDDSKNTAYLQMNNLKTEDTAVYYCVRHGNFGNSYISYWAYWGQGTLVTVSSGGGGSGGGGSGGGGSQTVVTQEPSLTVSPGGTVTLTCGSSTGAVTSGNYPNWVQQKPGQAPRGLIGGTKFLAPGTPARFSGSLLGGKAALTLSGVQPEDEAEYYCVLWYSNRWVFGGGTKLTVLGGGGSQRFCTGHFGGLHPCNGGGGGSGGGSRDWDFDVFGGGTPVGGHHHHHH

SEQ ID NO: 393 - protein, 571 aa, Artificial Sequence
  Synthetic polypeptide
QRFVTGHFGGLHPANGGGGGSQVQLQESGPGLVKPSQTLSLTCTVSGGSISSGGYYWSWVRQHPGKGLEWIGYIFYSGRTYYNPSLKSRVIISVDTSKNQFSLKLSSVTAADTAVYYCARVYSNYGWFDPWGQGTLVTVSSGGGGSGGGGSGGGGSEIVLTQSPGTLSLSPGERATLSCRASQSVSSSYLAWYQQKPGQAPRLLIYGASSRATGIPDRFSGSGSGTDFTLTISRLEPEDFAVYYCQQYGSSPLTFGGGTKVEIKSGGGGSEVQLVESGGGLVQPGGSLKLSCAASGFTFNKYAMNWVRQAPGKGLEWVARIRSKYNNYATYYADSVKDRFTISRDDSKNTAYLQMNNLKTEDTAVYYCVRHGNFGNSYISYWAYWGQGTLVTVSSGGGGSGGGGSGGGGSQTVVTQEPSLTVSPGGTVTLTCGSSTGAVTSGNYPNWVQQKPGQAPRGLIGGTKFLAPGTPARFSGSLLGGKAALTLSGVQPEDEAEYYCVLWYSNRWVFGGGTKLTVLGGGGSQRFCTGHFGGLHPCNGGGGGSGGGSRDWDFDVFGGGTPVGGHHHHHH

SEQ ID NO: 394 - protein, 571 aa, Artificial Sequence
  Synthetic polypeptide
QRFVTGHFGGLHPANGGGGGSQVQLQESGPGLVKPSQTLSLTCTVSGGSISSGGYYWSWIRQHPGKGLEWIGYIFYSGRTYYNPSLKSRVTISVDTSKNQFSLKLSSVTAADTAVYYCARVYSNYGWFDPWGQGTLVTVSSGGGGSGGGGSGGGGSEIVLTQSPGTLSLSPGERATLSCRASQSVSSSYLAWYQQKPGQAPRLLIYGASSRATGIPDRFSGSGSGTDFTLTISRLEPEDFAVYYCQQYGSSPLTFGGGTKVEIKSGGGGSEVQLVESGGGLVQPGGSLKLSCAASGFTFNKYAMNWVRQAPGKGLEWVARIRSKYNNYATYYADSVKDRFTISRDDSKNTAYLQMNNLKTEDTAVYYCVRHGNFGNSYISYWAYWGQGTLVTVSSGGGGSGGGGSGGGGSQTVVTQEPSLTVSPGGTVTLTCGSSTGAVTSGNYPNWVQQKPGQAPRGLIGGTKFLAPGTPARFSGSLLGGKAALTLSGVQPEDEAEYYCVLWYSNRWVFGGGTKLTVLGGGGSQRFCTGHFGGLHPCNGGGGGSGGGSRDWDFDVFGGGTPVGGHHHHHH

SEQ ID NO: 395 - protein, 571 aa, Artificial Sequence
  Synthetic polypeptide
QRFVTGHFGGLHPANGGGGGSQVQLQESGPGLVKPSQTLSLTCTVSGGSISSGGYYWSWIRQHPGKGLEWIGYIFYSGRTYYNPSLKSRVSISVDTSKNQFSLKLSSVTAADTAVYYCARVYSNYGWFDPWGQGTLVTVSSGGGGSGGGGSGGGGSEIVLTQSPGTLSLSPGERATLSCRASQSVSSSYLAWYQQKPGQAPRLLIYGASSRATGIPDRFSGSGSGTDFTLTISRLEPEDFAVYYCQQYGSSPLTFGGGTKVEIKSGGGGSEVQLVESGGGLVQPGGSLKLSCAASGFTFNKYAMNWVRQAPGKGLEWVARIRSKYNNYATYYADSVKDRFTISRDDSKNTAYLQMNNLKTEDTAVYYCVRHGNFGNSYISYWAYWGQGTLVTVSSGGGGSGGGGSGGGGSQTVVTQEPSLTVSPGGTVTLTCGSSTGAVTSGNYPNWVQQKPGQAPRGLIGGTKFLAPGTPARFSGSLLGGKAALTLSGVQPEDEAEYYCVLWYSNRWVFGGGTKLTVLGGGGSQRFCTGHFGGLHPCNGGGGGSGGGSRDWDFDVFGGGTPVGGHHHHHH

SEQ ID NO: 396 - protein, 571 aa, Artificial Sequence
  Synthetic polypeptide
QRFVTGHFGGLHPANGGGGGSQVQLQESGPGLVKPSETLSLTCTVSGGSVSSGGYYWSWIRQPPGKGLEWIGYIYYRGRTYYNPSLKSRVTISVDTSKNQFSLKLSSVTAADTAVYYCARVYSNYGWFDPWGQGTLVTVSSGGGGSGGGGSGGGGSEIVLTQSPGTLSLSPGERATLSCRASQSVSSSYLAWYQQKPGQAPRLLIYGASSRATGIPDRFSGSGSGTDFTLTISRLEPEDFAVYYCQQYGSSPLTFGGGTKVEIKSGGGGSEVQLVESGGGLVQPGGSLKLSCAASGFTFNKYAMNWVRQAPGKGLEWVARIRSKYNNYATYYADSVKDRFTISRDDSKNTAYLQMNNLKTEDTAVYYCVRHGNFGNSYISYWAYWGQGTLVTVSSGGGGSGGGGSGGGGSQTVVTQEPSLTVSPGGTVTLTCGSSTGAVTSGNYPNWVQQKPGQAPRGLIGGTKFLAPGTPARFSGSLLGGKAALTLSGVQPEDEAEYYCVLWYSNRWVFGGGTKLTVLGGGGSQRFCTGHFGGLHPCNGGGGGSGGGSRDWDFDVFGGGTPVGGHHHHHH

SEQ ID NO: 397 - protein, 570 aa, Artificial Sequence
  Synthetic polypeptide
QRFVTGHFGGLHPANGGGGGSQVQLQESGPGLVKPSQTLSLTCTVSGGSISSGGYYWSWIRQHPGKGLEWIGYIYYRGRTYYNPSLKSRVTISVDTSKNQFSLKLSSVTAADTAVYYCARVYSNYGWFDPWGQGTLVTVSSGGGGSGGGGSGGGGSEIVLTQSPGTLSLSPGERATLSCRASQSVSSSYLAWYQQKPGQAPRLLIYGASSRATGIPDRFSGSGSGTDFTLTISRLEPEDFAVYYCQQYGSSPTFGQGTRLEIKSGGGGSEVQLVESGGGLVQPGGSLKLSCAASGFTFNKYAMNWVRQAPGKGLEWVARIRSKYNNYATYYADSVKDRFTISRDDSKNTAYLQMNNLKTEDTAVYYCVRHGNFGNSYISYWAYWGQGTLVTVSSGGGGSGGGGSGGGGSQTVVTQEPSLTVSPGGTVTLTCGSSTGAVTSGNYPNWVQQKPGQAPRGLIGGTKFLAPGTPARFSGSLLGGKAALTLSGVQPEDEAEYYCVLWYSNRWVFGGGTKLTVLGGGGSQRFCTGHFGGLHPCNGGGGGSGGGSRDWDFDVFGGGTPVGGHHHHHH

SEQ ID NO: 398 - protein, 571 aa, Artificial Sequence
  Synthetic polypeptide
QRFVTGHFGGLHPANGGGGGSQVQLQESGPGLVKPSQTLSLTCTVSGGSISSGGYYWSWIRQHPGKGLEWIGYIFYSGKTYYNPSLKSRVSISVDTSKNQFSLKLSSVTAADTAVYYCARVYSNYGWFDPWGQGTLVTVSSGGGGSGGGGSGGGGSEIVLTQSPGTLSLSPGERATLSCRASQSVSSSYLAWYQQKPGQAPRLLIYGASSRATGIPDRFSGSGSGTDFTLTISRLEPEDFAVYYCQQYGSSPITFGQGTRLEIKSGGGGSEVQLVESGGGLVQPGGSLKLSCAASGFTFNKYAMNWVRQAPGKGLEWVARIRSKYNNYATYYADSVKDRFTISRDDSKNTAYLQMNNLKTEDTAVYYCVRHGNFGNSYISYWAYWGQGTLVTVSSGGGGSGGGGSGGGGSQTVVTQEPSLTVSPGGTVTLTCGSSTGAVTSGNYPNWVQQKPGQAPRGLIGGTKFLAPGTPARFSGSLLGGKAALTLSGVQPEDEAEYYCVLWYSNRWVFGGGTKLTVLGGGGSQRFCTGHFGGLHPCNGGGGGSGGGSRDWDFDVFGGGTPVGGHHHHHH

SEQ ID NO: 399 - protein, 576 aa, Artificial Sequence
  Synthetic polypeptide
QRFVTGHFGGLHPANGGGGGSQVQLQESGPGLVKPSETLSLTCTVSGGSISSYYWSWIRQPPGKGLEWIGYIYYSGSTNYNPSLKSRVTMSIDTSKNQFSLKLISVTAADTAVYYCARDQRRIVAAGGYYYGMDVWGQGTTVTVSSGGGGSGGGGSGGGGSEIVLTQSPGTLSLSPGERATLSCRASQSVSSSYLAWYQQKPGQAPRLLIYGASTRATGIPARFSGSGSGTDFTLTISRLEPEDFAVYYCQQYGSSPFTFGPGTKVDIKSGGGGSEVQLVESGGGLVQPGGSLKLSCAASGFTFNKYAMNWVRQAPGKGLEWVARIRSKYNNYATYYADSVKDRFTISRDDSKNTAYLQMNNLKTEDTAVYYCVRHGNFGNSYISYWAYWGQGTLVTVSSGGGGSGGGGSGGGGSQTVVTQEPSLTVSPGGTVTLTCGSSTGAVTSGNYPNWVQQKPGQAPRGLIGGTKFLAPGTPARFSGSLLGGKAALTLSGVQPEDEAEYYCVLWYSNRWVFGGGTKLTVLGGGGSQRFCTGHFGGLHPCNGGGGGSGGGSRDWDFDVFGGGTPVGGHHHHHH

SEQ ID NO: 400 - protein, 570 aa, Artificial Sequence
  Synthetic polypeptide
QRFVTGHFGGLHPANGGGGGSQVQLQESGPGLVKPSQTLSLTCTVSGGSISSNDYYWSWIRQHPGKGLEWIGYIYYSGSTFYNPSLKSRGAISVDTSKNQFSLKLTSVTAADTAVYYCARGVYRTGAFDIWGQGTMVTVSSGGGGSGGGGSGGGGSDIQMTQSPSSLSASVGDRVTITCRASQSISSYLNWYQQKPGKAPKSLIYAASSLQSGVPSKFSGSGSGTDFTLTISSLQPEDIATYYCQQSYSTPQAFGGGTKVDIKSGGGGSEVQLVESGGGLVQPGGSLKLSCAASGFTFNKYAMNWVRQAPGKGLEWVARIRSKYNNYATYYADSVKDRFTISRDDSKNTAYLQMNNLKTEDTAVYYCVRHGNFGNSYISYWAYWGQGTLVTVSSGGGGSGGGGSGGGGSQTVVTQEPSLTVSPGGTVTLTCGSSTGAVTSGNYPNWVQQKPGQAPRGLIGGTKFLAPGTPARFSGSLLGGKAALTLSGVQPEDEAEYYCVLWYSNRWVFGGGTKLTVLGGGGSQRFCTGHFGGLHPCNGGGGGSGGGSRDWDFDVFGGGTPVGGHHHHHH

SEQ ID NO: 401 - protein, 571 aa, Artificial Sequence
  Synthetic polypeptide
QRFVTGHFGGLHPANGGGGGSQVQLVQSGAEVKKPGASVKVSCKASGYTFTYYGISWVRQAPGQGLEWMGWINPYGGETNYAQKLQGRVTMTTDTSTSTAYMELRSLRSDDTAVYYCARGSGGFDYWGQGTLVTVSSGGGGSGGGGSGGGGSDIVMTQTPLSLSVTPGEPASISCRSSQSLLHSNGYNYLDWYLQKPGQSPQLLIYLGSYRASGVPDRFSGSGSGTDFTLKISRVEAEDVGVYYCMQALQTPFTFGPGTKVDIKSGGGGSEVQLVESGGGLVQPGGSLKLSCAASGFTFNKYAMNWVRQAPGKGLEWVARIRSKYNNYATYYADSVKDRFTISRDDSKNTAYLQMNNLKTEDTAVYYCVRHGNFGNSYISYWAYWGQGTLVTVSSGGGGSGGGGSGGGGSQTVVTQEPSLTVSPGGTVTLTCGSSTGAVTSGNYPNWVQQKPGQAPRGLIGGTKFLAPGTPARFSGSLLGGKAALTLSGVQPEDEAEYYCVLWYSNRWVFGGGTKLTVLGGGGSQRFCTGHFGGLHPCNGGGGGSGGGSRDWDFDVFGGGTPVGGHHHHHH

SEQ ID NO: 402 - protein, 571 aa, Artificial Sequence
  Synthetic polypeptide
QRFVTGHFGGLHPANGGGGGSQVQLVQSGAEVKKPGASVKVSCKASGYTFTYYGISWVRQAPGQGLEWMGWINPYSGATNYAQKLQGRVTMTTDTSTSTAYMELRSLRSDDTAVYYCARGSGGFDYWGQGTLVTVSSGGGGSGGGGSGGGGSDIVMTQTPLSLSVTPGEPASISCRSSQSLLHSNGYNYLDWYLQKPGQSPQLLIYLGSYRASGVPDRFSGSGSGTDFTLKISRVEAEDVGVYYCMQALQTPFTFGPGTKVDIKSGGGGSEVQLVESGGGLVQPGGSLKLSCAASGFTFNKYAMNWVRQAPGKGLEWVARIRSKYNNYATYYADSVKDRFTISRDDSKNTAYLQMNNLKTEDTAVYYCVRHGNFGNSYISYWAYWGQGTLVTVSSGGGGSGGGGSGGGGSQTVVTQEPSLTVSPGGTVTLTCGSSTGAVTSGNYPNWVQQKPGQAPRGLIGGTKFLAPGTPARFSGSLLGGKAALTLSGVQPEDEAEYYCVLWYSNRWVFGGGTKLTVLGGGGSQRFCTGHFGGLHPCNGGGGGSGGGSRDWDFDVFGGGTPVGGHHHHHH

SEQ ID NO: 403 - protein, 571 aa, Artificial Sequence
  Synthetic polypeptide
QRFVTGHFGGLHPANGGGGGSQVQLVQSGAEVKKPGASVKVSCKASGYTFTYYGISWVRQAPGQGLEWMGWINPYTGKTNYAQKLQGRVTMTTDTSTSTAYMELRSLRSDDTAVYYCARGSGGFDYWGQGTLVTVSSGGGGSGGGGSGGGGSDIVMTQTPLSLSVTPGEPASISCRSSQSLLHSNGYNYLDWYLQKPGQSPQLLIYLGSYRASGVPDRFSGSGSGTDFTLKISRVEAEDVGVYYCMQALQTPFTFGPGTKVDIKSGGGGSEVQLVESGGGLVQPGGSLKLSCAASGFTFNKYAMNWVRQAPGKGLEWVARIRSKYNNYATYYADSVKDRFTISRDDSKNTAYLQMNNLKTEDTAVYYCVRHGNFGNSYISYWAYWGQGTLVTVSSGGGGSGGGGSGGGGSQTVVTQEPSLTVSPGGTVTLTCGSSTGAVTSGNYPNWVQQKPGQAPRGLIGGTKFLAPGTPARFSGSLLGGKAALTLSGVQPEDEAEYYCVLWYSNRWVFGGGTKLTVLGGGGSQRFCTGHFGGLHPCNGGGGGSGGGSRDWDFDVFGGGTPVGGHHHHHH

SEQ ID NO: 404 - protein, 571 aa, Artificial Sequence
  Synthetic polypeptide
QRFVTGHFGGLHPANGGGGGSQVQLVQSGAEVKKPGASVKVSCKASGYTFTYYGISWVRQAPGQGLEWMGWINPYTGKTNYAQKLQGRVTMTTDTSTSTAYMELRSLRSDDTAVYYCARGSGGFDYWGQGTLVTVSSGGGGSGGGGSGGGGSDIVMTQTPLSLSVTPGEPASISCRSSQSLLHSVGYNYLDWYLQKPGQSPQLLIYLGSYRASGVPDRFSGSGSGTDFTLKISRVEAEDVGVYYCMQALQTPFTFGPGTKVDIKSGGGGSEVQLVESGGGLVQPGGSLKLSCAASGFTFNKYAMNWVRQAPGKGLEWVARIRSKYNNYATYYADSVKDRFTISRDDSKNTAYLQMNNLKTEDTAVYYCVRHGNFGNSYISYWAYWGQGTLVTVSSGGGGSGGGGSGGGGSQTVVTQEPSLTVSPGGTVTLTCGSSTGAVTSGNYPNWVQQKPGQAPRGLIGGTKFLAPGTPARFSGSLLGGKAALTLSGVQPEDEAEYYCVLWYSNRWVFGGGTKLTVLGGGGSQRFCTGHFGGLHPCNGGGGGSGGGSRDWDFDVFGGGTPVGGHHHHHH

SEQ ID NO: 405 - protein, 571 aa, Artificial Sequence
  Synthetic polypeptide
QRFVTGHFGGLHPANGGGGGSQVQLVQSGAEVKKPGASVKVSCKASGYTFTSYGISWVRQAPGQGLEWMGWINPYTGNRNYAQKVQDRVTMTTDTSTNTAYMELSSLRSDDTAVYYCARGSGGFDYWGQGTLVTVSSGGGGSGGGGSGGGGSDIVMTQSPLSLPVTLGQPASISCRSSQSLLHSVGYNYLDWYLQKPGQSPQLLIYLGSNRASGVPDRFSGSGSGTDFTLKISRVEAEDVGVYYCMQALQTPFTFGPGTKLEIKSGGGGSEVQLVESGGGLVQPGGSLKLSCAASGFTFNKYAMNWVRQAPGKGLEWVARIRSKYNNYATYYADSVKDRFTISRDDSKNTAYLQMNNLKTEDTAVYYCVRHGNFGNSYISYWAYWGQGTLVTVSSGGGGSGGGGSGGGGSQTVVTQEPSLTVSPGGTVTLTCGSSTGAVTSGNYPNWVQQKPGQAPRGLIGGTKFLAPGTPARFSGSLLGGKAALTLSGVQPEDEAEYYCVLWYSNRWVFGGGTKLTVLGGGGSQRFCTGHFGGLHPCNGGGGGSGGGSRDWDFDVFGGGTPVGGHHHHHH

SEQ ID NO: 406 - protein, 571 aa, Artificial Sequence
  Synthetic polypeptide
QRFVTGHFGGLHPANGGGGGSQVQLVQSGAEVKKPGASVKVSCKASGYTFTYYGISWVRQAPGQGLEWMGWINPYTGKTNYAQKLQDRVTMTTDTSTNTAYMELRSLRSDDTAVYYCARGSGGFDYWGQGTLVTVSSGGGGSGGGGSGGGGSDIVMTQTPLSLPVTPGEPASISCRSSQSLLHSVGYNYLDWYLQKPGQSPQLLIYLGSNRASGVPDRFSGSGSGTDFTLKISRVEAEDVGVYYCMQALQTPFTFGPGTKVDIKSGGGGSEVQLVESGGGLVQPGGSLKLSCAASGFTFNKYAMNWVRQAPGKGLEWVARIRSKYNNYATYYADSVKDRFTISRDDSKNTAYLQMNNLKTEDTAVYYCVRHGNFGNSYISYWAYWGQGTLVTVSSGGGGSGGGGSGGGGSQTVVTQEPSLTVSPGGTVTLTCGSSTGAVTSGNYPNWVQQKPGQAPRGLIGGTKFLAPGTPARFSGSLLGGKAALTLSGVQPEDEAEYYCVLWYSNRWVFGGGTKLTVLGGGGSQRFCTGHFGGLHPCNGGGGGSGGGSRDWDFDVFGGGTPVGGHHHHHH

SEQ ID NO: 407 - protein, 571 aa, Artificial Sequence
  Synthetic polypeptide
QRFVTGHFGGLHPANGGGGGSQVQLVQSGAEVKKPGASVKVSCKASGYTFTTYGISWVRQAPGQGLEWMGWINPYTGKTNYAQKLQGRVTMATDTSTSTAYMELRSLRSDDTAVYYCARGSGGFDYWGQGTLVTVSSGGGGSGGGGSGGGGSDIVMTQSPLSLPVTPGEPASISCRSSQSLLHSVGYNYLDWYLQKPGQSPQLLIYLGSNRASGVPDRFSGSGSGTDFTLKISRVEAEDVGVYYCMQALQTPFTFGPGTKLEIKSGGGGSEVQLVESGGGLVQPGGSLKLSCAASGFTFNKYAMNWVRQAPGKGLEWVARIRSKYNNYATYYADSVKDRFTISRDDSKNTAYLQMNNLKTEDTAVYYCVRHGNFGNSYISYWAYWGQGTLVTVSSGGGGSGGGGSGGGGSQTVVTQEPSLTVSPGGTVTLTCGSSTGAVTSGNYPNWVQQKPGQAPRGLIGGTKFLAPGTPARFSGSLLGGKAALTLSGVQPEDEAEYYCVLWYSNRWVFGGGTKLTVLGGGGSQRFCTGHFGGLHPCNGGGGGSGGGSRDWDFDVFGGGTPVGGHHHHHH

SEQ ID NO: 408 - protein, 571 aa, Artificial Sequence
  Synthetic polypeptide
QRFVTGHFGGLHPANGGGGGSQVQLVQSGAEVKEPGASVKVSCKASGYTFTYYGISWVRQAPGQGLEWMGWINPYTGNRNYAQKVQDRVTMTTDTSTNTAYMELRSLRSDDTAVYYCARGSGGFDYWGQGTLVTVSSGGGGSGGGGSGGGGSDIVMTQSPLSLPVTPGEPASISCRSSQSLLHSVGYNYLDWYLQKPGQSPQLLIYLGSNRASGVPDRFSGSGSGTDFTLKISRVEAEDVGVYYCMQALQTPFTFGPGTKLEIKSGGGGSEVQLVESGGGLVQPGGSLKLSCAASGFTFNKYAMNWVRQAPGKGLEWVARIRSKYNNYATYYADSVKDRFTISRDDSKNTAYLQMNNLKTEDTAVYYCVRHGNFGNSYISYWAYWGQGTLVTVSSGGGGSGGGGSGGGGSQTVVTQEPSLTVSPGGTVTLTCGSSTGAVTSGNYPNWVQQKPGQAPRGLIGGTKFLAPGTPARFSGSLLGGKAALTLSGVQPEDEAEYYCVLWYSNRWVFGGGTKLTVLGGGGSQRFCTGHFGGLHPCNGGGGGSGGGSRDWDFDVFGGGTPVGGHHHHHH

SEQ ID NO: 409 - protein, 571 aa, Artificial Sequence
  Synthetic polypeptide
QRFVTGHFGGLHPANGGGGGSQVQLVQSGAEVKKPGASVKVSCKASGYTFTYYGISWVRQAPGQGLEWMGWINPYTGKTNYAQKLQGRVTMTTDTSTSTAYMELRSLRSDDTAVYYCARGSGGFDYWGQGTLVTVSSGGGGSGGGGSGGGGSDIVMTQSPLSLPVTPGEPASISCRSSQSLLHSVGYNYLDWYLQKPGQSPQLLIYLGSNRASGVPDRFSGSGSGTDFTLKISRVEAEDVGVYYCMQALQTPFTFGPGTKVEIKSGGGGSEVQLVESGGGLVQPGGSLKLSCAASGFTFNKYAMNWVRQAPGKGLEWVARIRSKYNNYATYYADSVKDRFTISRDDSKNTAYLQMNNLKTEDTAVYYCVRHGNFGNSYISYWAYWGQGTLVTVSSGGGGSGGGGSGGGGSQTVVTQEPSLTVSPGGTVTLTCGSSTGAVTSGNYPNWVQQKPGQAPRGLIGGTKFLAPGTPARFSGSLLGGKAALTLSGVQPEDEAEYYCVLWYSNRWVFGGGTKLTVLGGGGSQRFCTGHFGGLHPCNGGGGGSGGGSRDWDFDVFGGGTPVGGHHHHHH

SEQ ID NO: 410 - protein, 571 aa, Artificial Sequence
  Synthetic polypeptide
QRFVTGHFGGLHPANGGGGGSQVQLVQSGAEVKKPGASVKVSCKASGYTFTSYGITWVRQAPGQGLEWMGWINPYTGNRNYAQKVQGRVTMTTDTSTSTAYMELRSLRSDDTAVYYCARGSGGFDYWGQGTLVTVSSGGGGSGGGGSGGGGSDIVMTQSPLSLSVTPGEPASISCRSSQSLLHSVGYNYLDWYLQKPGQSPQLLIYLGSNRASGVPDRFSGSGSGTDFTLKISRVEAEDVGVYYCMQALQTPFTFGPGTKVDIKSGGGGSEVQLVESGGGLVQPGGSLKLSCAASGFTFNKYAMNWVRQAPGKGLEWVARIRSKYNNYATYYADSVKDRFTISRDDSKNTAYLQMNNLKTEDTAVYYCVRHGNFGNSYISYWAYWGQGTLVTVSSGGGGSGGGGSGGGGSQTVVTQEPSLTVSPGGTVTLTCGSSTGAVTSGNYPNWVQQKPGQAPRGLIGGTKFLAPGTPARFSGSLLGGKAALTLSGVQPEDEAEYYCVLWYSNRWVFGGGTKLTVLGGGGSQRFCTGHFGGLHPCNGGGGGSGGGSRDWDFDVFGGGTPVGGHHHHHH

SEQ ID NO: 411 - protein, 571 aa, Artificial Sequence
  Synthetic polypeptide
QRFVTGHFGGLHPANGGGGGSQVQLVQSGAEVKKPGASVKVSCKASGYTFTSYGISWVRQAPGQGLEWMGWINPYTGNRNYAQKFQGRVTMTTDTSTNTAYMELSSLRSEDTAVYYCARGSGGFDYWGQGTLVTVSSGGGGSGGGGSGGGGSDIVMTQSPLSLPVTPGEPASISCRSSQSLLHSVGYNYLDWYLQKPGQSPQLLIYLGSNRASGVPDRFSGSGSGTDFTLKISRVEAEDVGVYYCMQALQTPFTFGPGTKVDIKSGGGGSEVQLVESGGGLVQPGGSLKLSCAASGFTFNKYAMNWVRQAPGKGLEWVARIRSKYNNYATYYADSVKDRFTISRDDSKNTAYLQMNNLKTEDTAVYYCVRHGNFGNSYISYWAYWGQGTLVTVSSGGGGSGGGGSGGGGSQTVVTQEPSLTVSPGGTVTLTCGSSTGAVTSGNYPNWVQQKPGQAPRGLIGGTKFLAPGTPARFSGSLLGGKAALTLSGVQPEDEAEYYCVLWYSNRWVFGGGTKLTVLGGGGSQRFCTGHFGGLHPCNGGGGGSGGGSRDWDFDVFGGGTPVGGHHHHHH

SEQ ID NO: 412 - protein, 571 aa, Artificial Sequence
  Synthetic polypeptide
QRFVTGHFGGLHPANGGGGGSQVQLVQSGAEVKKPGASVKVSCKASGYSFTSYGISWVRQAPGQGLEWMGWINPYTGNRNYAQKVQGRVTMTTDTSTSTAYMELRSLRSDDTAVYYCARGSGGFDYWGQGTLVTVSSGGGGSGGGGSGGGGSDIVMTQSPLSLPVTPGEPASISCRSSQSLLHSVGYNYLDWYLQKPGQSPQLLIYLGSNRASGVPDRFSGSGSGTDFTLKISRVEAEDVGVYYCMQALQTPFTFGPGTKVEIKSGGGGSEVQLVESGGGLVQPGGSLKLSCAASGFTFNKYAMNWVRQAPGKGLEWVARIRSKYNNYATYYADSVKDRFTISRDDSKNTAYLQMNNLKTEDTAVYYCVRHGNFGNSYISYWAYWGQGTLVTVSSGGGGSGGGGSGGGGSQTVVTQEPSLTVSPGGTVTLTCGSSTGAVTSGNYPNWVQQKPGQAPRGLIGGTKFLAPGTPARFSGSLLGGKAALTLSGVQPEDEAEYYCVLWYSNRWVFGGGTKLTVLGGGGSQRFCTGHFGGLHPCNGGGGGSGGGSRDWDFDVFGGGTPVGGHHHHHH

SEQ ID NO: 413 - protein, 571 aa, Artificial Sequence
  Synthetic polypeptide
QRFVTGHFGGLHPANGGGGGSQVQLVQSGAEVKKPGASVKVSCKASGYTFTYYGISWVRQAPGQGLEWMGWINPYTGKTNYAQKVQGRVTMTTDTSTSTAYMELRNLRSDDTAVYYCARGSGGFDYWGQGTLVTVSSGGGGSGGGGSGGGGSDIVMTQTPLSLSVTPGQPASISCRSSQSLLHSVGYNYLDWYLQKPGQSPQLLIYLGSNRASGVPDRFSGSGSGTDFTLKISRVEAEDVGVYYCMQALQTPFTFGPGTKVDIKSGGGGSEVQLVESGGGLVQPGGSLKLSCAASGFTFNKYAMNWVRQAPGKGLEWVARIRSKYNNYATYYADSVKDRFTISRDDSKNTAYLQMNNLKTEDTAVYYCVRHGNFGNSYISYWAYWGQGTLVTVSSGGGGSGGGGSGGGGSQTVVTQEPSLTVSPGGTVTLTCGSSTGAVTSGNYPNWVQQKPGQAPRGLIGGTKFLAPGTPARFSGSLLGGKAALTLSGVQPEDEAEYYCVLWYSNRWVFGGGTKLTVLGGGGSQRFCTGHFGGLHPCNGGGGGSGGGSRDWDFDVFGGGTPVGGHHHHHH

SEQ ID NO: 414 - protein, 571 aa, Artificial Sequence
  Synthetic polypeptide
QRFVTGHFGGLHPANGGGGGSQVQLVQSGAEVKKPGASVKVSCKASGYTFTYYGISWVRQAPGQGLEWMGWINPYTGKTNYAQKLQGRVTMTTDTSTSTAYMELRSLRSDDTAVYYCARGSGGFDYWGQGTLVTVSSGGGGSGGGGSGGGGSDIVMTQTPLSLSVTPGQPASISCRSSQSLLHSVGYNYLDWYLQKPGQSPQLLIYLGSNRASGVPDRFSGSGSGTDFTLKISRVEAEDVGVYYCMQALQTPFTFGPGTKVDIKSGGGGSEVQLVESGGGLVQPGGSLKLSCAASGFTFNKYAMNWVRQAPGKGLEWVARIRSKYNNYATYYADSVKDRFTISRDDSKNTAYLQMNNLKTEDTAVYYCVRHGNFGNSYISYWAYWGQGTLVTVSSGGGGSGGGGSGGGGSQTVVTQEPSLTVSPGGTVTLTCGSSTGAVTSGNYPNWVQQKPGQAPRGLIGGTKFLAPGTPARFSGSLLGGKAALTLSGVQPEDEAEYYCVLWYSNRWVFGGGTKLTVLGGGGSQRFCTGHFGGLHPCNGGGGGSGGGSRDWDFDVFGGGTPVGGHHHHHH

SEQ ID NO: 415 - protein, 575 aa, Artificial Sequence
  Synthetic polypeptide
QRFVTGHFGGLHPANGGGGGSQVQLVESGGGVVQPGRSLRLSCAASGFTFRNYAMHWVRQAPGKGLEWVAVISYSGNNKYYASSVKGRFTISRDNSKNTLYLQLNSLRAEDTAVYYCAREFYYDSTGYDYSTPGDYWGQGTLVTVSSGGGGSGGGGSGGGGSDIQMTQSPSSLSASVGDRVTITCQASQDISNYLNWYQQKPGKAPKLLIYDASNLETGVPSRFSGSGSGTDFTFTISSLQPEDIATYYCQQYDNLPTFGQGTRLEIKSGGGGSEVQLVESGGGLVQPGGSLKLSCAASGFTFNKYAMNWVRQAPGKGLEWVARIRSKYNNYATYYADSVKDRFTISRDDSKNTAYLQMNNLKTEDTAVYYCVRHGNFGNSYISYWAYWGQGTLVTVSSGGGGSGGGGSGGGGSQTVVTQEPSLTVSPGGTVTLTCGSSTGAVTSGNYPNWVQQKPGQAPRGLIGGTKFLAPGTPARFSGSLLGGKAALTLSGVQPEDEAEYYCVLWYSNRWVFGGGTKLTVLGGGGSQRFCTGHFGGLHPCNGGGGGSGGGSRDWDFDVFGGGTPVGGHHHHHH

SEQ ID NO: 416 - protein, 576 aa, Artificial Sequence
  Synthetic polypeptide
QRFVTGHFGGLHPANGGGGGSQVQLVESGGGVVQPGRSLRLSCVASGFTFRNYAMHWVRQAPGKGLEWVAVISYSGNNKYYASSVKGRFTISRDNSKNTLYLQLNSLRAEDTAVYYCAREFYYDSTGYDYSTPGDYWGQGTLVTVSSGGGGSGGGGSGGGGSDIQMTQSPSSLSASVGDRVTITCRASQSISSYLNWYQQKPGKAPKLLIYDASSLQSGVPSRFSGSGSGTEFTLTISSLQAEDVAVYYCQQYYSTPLTFGGGTKVDIKSGGGGSEVQLVESGGGLVQPGGSLKLSCAASGFTFNKYAMNWVRQAPGKGLEWVARIRSKYNNYATYYADSVKDRFTISRDDSKNTAYLQMNNLKTEDTAVYYCVRHGNFGNSYISYWAYWGQGTLVTVSSGGGGSGGGGSGGGGSQTVVTQEPSLTVSPGGTVTLTCGSSTGAVTSGNYPNWVQQKPGQAPRGLIGGTKFLAPGTPARFSGSLLGGKAALTLSGVQPEDEAEYYCVLWYSNRWVFGGGTKLTVLGGGGSQRFCTGHFGGLHPCNGGGGGSGGGSRDWDFDVFGGGTPVGGHHHHHH

SEQ ID NO: 417 - protein, 576 aa, Artificial Sequence
  Synthetic polypeptide
QRFVTGHFGGLHPANGGGGGSQVQLVESGGGVVQPGRSLRLSCAASGFTFRNYAMHWVRQAPGKGLEWVAGISYSGTNKYYASSVKGRFTISRDNSKNTLYLQLNSLRAEDTAVYYCAREFYYDSTGYDYSTPGDYWGQGTLVTVSSGGGGSGGGGSGGGGSDIQMTQSPSSLSASVGDRVTITCQASQDISNYLNWYQQKPGKAPKLLIYDASNLETGVPSRFSGSGSGTEFTLTISSLQPEDIATYYCQQYDNLPLTFGGGTKVDIKSGGGGSEVQLVESGGGLVQPGGSLKLSCAASGFTFNKYAMNWVRQAPGKGLEWVARIRSKYNNYATYYADSVKDRFTISRDDSKNTAYLQMNNLKTEDTAVYYCVRHGNFGNSYISYWAYWGQGTLVTVSSGGGGSGGGGSGGGGSQTVVTQEPSLTVSPGGTVTLTCGSSTGAVTSGNYPNWVQQKPGQAPRGLIGGTKFLAPGTPARFSGSLLGGKAALTLSGVQPEDEAEYYCVLWYSNRWVFGGGTKLTVLGGGGSQRFCTGHFGGLHPCNGGGGGSGGGSRDWDFDVFGGGTPVGGHHHHHH

SEQ ID NO: 418 - protein, 576 aa, Artificial Sequence
  Synthetic polypeptide
QRFVTGHFGGLHPANGGGGGSQVQLVESGGGVVQPGRSLRLSCVASGFTFRNYAMHWVRQAPGKGLEWVAVISYSGNNKYYASSVKGRFTISRDNSKNTLFLQLNSLRAEDTAVYYCAREFYYDSTGYDYSTPGNYWGQGTLVTVSSGGGGSGGGGSGGGGSDIQMTQSPSSLSASVGDRVTITCQASQDISNYLNWYQQKPGKAPKLLIYDASNLETGVPSRFSGSGSGTDFTFTISSLQPEDIATYYCQQYVNLPLTFGGGTKLEIKSGGGGSEVQLVESGGGLVQPGGSLKLSCAASGFTFNKYAMNWVRQAPGKGLEWVARIRSKYNNYATYYADSVKDRFTISRDDSKNTAYLQMNNLKTEDTAVYYCVRHGNFGNSYISYWAYWGQGTLVTVSSGGGGSGGGGSGGGGSQTVVTQEPSLTVSPGGTVTLTCGSSTGAVTSGNYPNWVQQKPGQAPRGLIGGTKFLAPGTPARFSGSLLGGKAALTLSGVQPEDEAEYYCVLWYSNRWVFGGGTKLTVLGGGGSQRFCTGHFGGLHPCNGGGGGSGGGSRDWDFDVFGGGTPVGGHHHHHH

SEQ ID NO: 419 - protein, 573 aa, Artificial Sequence
  Synthetic polypeptide
QRFVTGHFGGLHPANGGGGGSQVQLVESGGGVVQPGRSLRLSCAASGFTFSSYGMQWVRQAPGKGLEWVAVIWYSGSNKYYASSVKGRFTISRDNSKNTLYLQMNSLRAEDTAVYYCARDGYPIFYRYYGMDVWGQGTTVTVSSGGGGSGGGGSGGGGSDIQMTQSPSSLSASVGDRVTITCRASQGISNYLAWYQQKPGKVPKLLIYAASTLQSGVPSRFSGSGSGTDFTLTISSLQPEDVATYYCQKYNSAPLTFGGGTKVEIKSGGGGSEVQLVESGGGLVQPGGSLKLSCAASGFTFNKYAMNWVRQAPGKGLEWVARIRSKYNNYATYYADSVKDRFTISRDDSKNTAYLQMNNLKTEDTAVYYCVRHGNFGNSYISYWAYWGQGTLVTVSSGGGGSGGGGSGGGGSQTVVTQEPSLTVSPGGTVTLTCGSSTGAVTSGNYPNWVQQKPGQAPRGLIGGTKFLAPGTPARFSGSLLGGKAALTLSGVQPEDEAEYYCVLWYSNRWVFGGGTKLTVLGGGGSQRFCTGHFGGLHPCNGGGGGSGGGSRDWDFDVFGGGTPVGGHHHHHH

SEQ ID NO: 420 - protein, 574 aa, Artificial Sequence
  Synthetic polypeptide
QRFVTGHFGGLHPANGGGGGSQVQLVESGGGVVQPGRSLRLSCAASGFTFSSYGMHWVRQAPGKGLEWVAVISYSGSNKYYASSVKGRFTISRDNSKNTLYLQMNSLRAEDTAVYYCARDGYPIFYRYYGMDVWGQGTTVTVSSGGGGSGGGGSGGGGSEIVLTQSPGTLSLSPGERATLSCRASQSVSSSYLAWYQQKPGQAPRLLIYGASSRATGIPDRFSGSGSGTDFTLTISRLEPEDLAVYYCQQYGTSPLTFGGGTKLEIKSGGGGSEVQLVESGGGLVQPGGSLKLSCAASGFTFNKYAMNWVRQAPGKGLEWVARIRSKYNNYATYYADSVKDRFTISRDDSKNTAYLQMNNLKTEDTAVYYCVRHGNFGNSYISYWAYWGQGTLVTVSSGGGGSGGGGSGGGGSQTVVTQEPSLTVSPGGTVTLTCGSSTGAVTSGNYPNWVQQKPGQAPRGLIGGTKFLAPGTPARFSGSLLGGKAALTLSGVQPEDEAEYYCVLWYSNRWVFGGGTKLTVLGGGGSQRFCTGHFGGLHPCNGGGGGSGGGSRDWDFDVFGGGTPVGGHHHHHH

SEQ ID NO: 421 - protein, 574 aa, Artificial Sequence
  Synthetic polypeptide
QRFVTGHFGGLHPANGGGGGSQVQLVESGGGVVQPGRSLRLSCAASGFTFSSFGMHWVRQAPGKGLEWVAFIWYSGSNKYYASSVKGRVTISRDNSKNTLYLQMNSLRAEDTAVYYCARDGYPIFYYYYGMDVWGQGTTVTVSSGGGGSGGGGSGGGGSEIVLTQSPGTLSLSPGERATLSCRASQSVSSSYLAWYQQKPGQAPRLLIYGASSRATGIPDRFSGSGSGTDFTLTISRLEPEDFAVYYCQQYGSSPFTFGPGTRLEIKSGGGGSEVQLVESGGGLVQPGGSLKLSCAASGFTFNKYAMNWVRQAPGKGLEWVARIRSKYNNYATYYADSVKDRFTISRDDSKNTAYLQMNNLKTEDTAVYYCVRHGNFGNSYISYWAYWGQGTLVTVSSGGGGSGGGGSGGGGSQTVVTQEPSLTVSPGGTVTLTCGSSTGAVTSGNYPNWVQQKPGQAPRGLIGGTKFLAPGTPARFSGSLLGGKAALTLSGVQPEDEAEYYCVLWYSNRWVFGGGTKLTVLGGGGSQRFCTGHFGGLHPCNGGGGGSGGGSRDWDFDVFGGGTPVGGHHHHHH

SEQ ID NO: 422 - protein, 574 aa, Artificial Sequence
  Synthetic polypeptide
QRFVTGHFGGLHPANGGGGGSQVQLVESGGGVVQPGGSLRLSCAASGFTFSSYGMHWVRQAPGKGLEWVAFIWYDGSNKYYADSVKGRFTISRDNSKNTLYLQMNSLRAEDTAVYYCARRAGIIGTIGYYYGMDVWGQGTTVTVSSGGGGSGGGGSGGGGSSYELTQPPSVSVSPGQTASITCSGDRLGEKYTSWYQQRPGQSPLLVIYQDTKRPSGIPERFSGSNSGNTATLTISGTQAMDEADYYCQAWESSTVVFGGGTKLTVLSGGGGSEVQLVESGGGLVQPGGSLKLSCAASGFTFNKYAMNWVRQAPGKGLEWVARIRSKYNNYATYYADSVKDRFTISRDDSKNTAYLQMNNLKTEDTAVYYCVRHGNFGNSYISYWAYWGQGTLVTVSSGGGGSGGGGSGGGGSQTVVTQEPSLTVSPGGTVTLTCGSSTGAVTSGNYPNWVQQKPGQAPRGLIGGTKFLAPGTPARFSGSLLGGKAALTLSGVQPEDEAEYYCVLWYSNRWVFGGGTKLTVLGGGGSQRFVTGHFGGLHPANGGGGGSGGGSRDWDFDVFGGGTPVGGHHHHHH

SEQ ID NO: 423 - protein, 571 aa, Artificial Sequence
  Synthetic polypeptide
QRFVTGHFGGLHPANGGGGGSQVQLQESGPGLVKPSQTLSLTCTVSGGSISRGGYYWSWIRQHPGKGLEWIGYIFYRGRTYYNPSLKSRVTISVDTSKNQFSLKLSSVTAADTAVYYCARVNSNYGWFDPWGQGTLVTVSSGGGGSGGGGSGGGGSEIVLTQFPGTLSLSPGERATLSCRASQSVSSSYLAWYQQKPGQAPRLLIYGASSRATGIPDRFSGSGSGTDFTLTISRLEPEDFAVYYCQQYGSSPLTFGGGTKLEIKSGGGGSEVQLVESGGGLVQPGGSLKLSCAASGFTFNKYAMNWVRQAPGKGLEWVARIRSKYNNYATYYADSVKDRFTISRDDSKNTAYLQMNNLKTEDTAVYYCVRHGNFGNSYISYWAYWGQGTLVTVSSGGGGSGGGGSGGGGSQTVVTQEPSLTVSPGGTVTLTCGSSTGAVTSGNYPNWVQQKPGQAPRGLIGGTKFLAPGTPARFSGSLLGGKAALTLSGVQPEDEAEYYCVLWYSNRWVFGGGTKLTVLGGGGSQRFVTGHFGGLHPANGGGGGSGGGSRDWDFDVFGGGTPVGGHHHHHH

SEQ ID NO: 424 - protein, 571 aa, Artificial Sequence
  Synthetic polypeptide
QRFVTGHFGGLHPANGGGGGSQVQLQESGPGLVKPSQTLSLTCTVSGGSISSGGYYWSWIRQHPGKGLEWIGYIFYRGRTYYNPSLKSRVTISVDTSKNQFSLKLSSVTAADTAVYYCARVYSNYGWFDPWGQGTLVTVSSGGGGSGGGGSGGGGSEIVLTQSPGTLSLSPGERATLSCRASQSVSSSYLAWYQQKPGQAPRLLIYGTSNRATGIPDRFSGSGSGTDFTLTISRLEPEDFAVYYCQQYGSSPLTFGGGTKLEIKSGGGGSEVQLVESGGGLVQPGGSLKLSCAASGFTFNKYAMNWVRQAPGKGLEWVARIRSKYNNYATYYADSVKDRFTISRDDSKNTAYLQMNNLKTEDTAVYYCVRHGNFGNSYISYWAYWGQGTLVTVSSGGGGSGGGGSGGGGSQTVVTQEPSLTVSPGGTVTLTCGSSTGAVTSGNYPNWVQQKPGQAPRGLIGGTKFLAPGTPARFSGSLLGGKAALTLSGVQPEDEAEYYCVLWYSNRWVFGGGTKLTVLGGGGSQRFVTGHFGGLHPANGGGGGSGGGSRDWDFDVFGGGTPVGGHHHHHH

SEQ ID NO: 425 - protein, 571 aa, Artificial Sequence
  Synthetic polypeptide
QRFVTGHFGGLHPANGGGGGSQVQLQESGPGLVKPSQTLSLTCTVSGGSISSGGYYWSWIRQHPGKGLEWIGYIFYSGRTYYNPSLKSRVTISVDTSKNQFSLKLSSVTAADTAVYYCARVYSNYGWFDPWGQGTLVTVSSGGGGSGGGGSGGGGSEIVLTQSPGTLSLSPGERATLSCRASQSVSSSYLAWYQQKPGQAPRLLIYGASSRATGIPDRFSGSGSGTDFTLTISRLEPEDFAVYYCQQYGSSPLTFGGGTKLEIKSGGGGSEVQLVESGGGLVQPGGSLKLSCAASGFTFNKYAMNWVRQAPGKGLEWVARIRSKYNNYATYYADSVKDRFTISRDDSKNTAYLQMNNLKTEDTAVYYCVRHGNFGNSYISYWAYWGQGTLVTVSSGGGGSGGGGSGGGGSQTVVTQEPSLTVSPGGTVTLTCGSSTGAVTSGNYPNWVQQKPGQAPRGLIGGTKFLAPGTPARFSGSLLGGKAALTLSGVQPEDEAEYYCVLWYSNRWVFGGGTKLTVLGGGGSQRFVTGHFGGLHPANGGGGGSGGGSRDWDFDVFGGGTPVGGHHHHHH

SEQ ID NO: 426 - protein, 571 aa, Artificial Sequence
  Synthetic polypeptide
QRFVTGHFGGLHPANGGGGGSQVQLQESGPGLVKPSQTLSLTCTVSGGSISSGGYYWSWIRQHPGKGLEWIGYIFYSGRTYYNPSLKSRVTISVDTSKNQFSLKLRSVTAADTAVYYCARVYSNYGWFDPWGQGTLVTVSSGGGGSGGGGSGGGGSEIVLTQSPGTLSLSPGERATLSCRASQSVSSSYLAWYQQKPGQAPRLLIYGASSRATGIPDRFSGSGSGTDFTLTISRLEPEDFAVYYCQQYGSSPLTFGGGTKLEIKSGGGGSEVQLVESGGGLVQPGGSLKLSCAASGFTFNKYAMNWVRQAPGKGLEWVARIRSKYNNYATYYADSVKDRFTISRDDSKNTAYLQMNNLKTEDTAVYYCVRHGNFGNSYISYWAYWGQGTLVTVSSGGGGSGGGGSGGGGSQTVVTQEPSLTVSPGGTVTLTCGSSTGAVTSGNYPNWVQQKPGQAPRGLIGGTKFLAPGTPARFSGSLLGGKAALTLSGVQPEDEAEYYCVLWYSNRWVFGGGTKLTVLGGGGSQRFVTGHFGGLHPANGGGGGSGGGSRDWDFDVFGGGTPVGGHHHHHH

SEQ ID NO: 427 - protein, 571 aa, Artificial Sequence
  Synthetic polypeptide
QRFVTGHFGGLHPANGGGGGSQVQLQESGPGLVKPSQTLSLTCTVSGGSISSGGYYWSWIRQHPGKGLEWIGYIYYSGSTFYNPSLRSRVTISVDTSKNQFSLKLSSVTAADTAVYYCARDSSSSRALDYWGQGTLVTVSSGGGGSGGGGSGGGGSEIVLTQSPGTLSLSPGERATLSCRASQSVSSSYLAWYQQKPGQAPRLLIYGASSRATGIPDRFSGSGSGTDFTLTISRLEPEDFAVYYCQQYDSSPRTFGQGTKLEIKSGGGGSEVQLVESGGGLVQPGGSLKLSCAASGFTFNKYAMNWVRQAPGKGLEWVARIRSKYNNYATYYADSVKDRFTISRDDSKNTAYLQMNNLKTEDTAVYYCVRHGNFGNSYISYWAYWGQGTLVTVSSGGGGSGGGGSGGGGSQTVVTQEPSLTVSPGGTVTLTCGSSTGAVTSGNYPNWVQQKPGQAPRGLIGGTKFLAPGTPARFSGSLLGGKAALTLSGVQPEDEAEYYCVLWYSNRWVFGGGTKLTVLGGGGSQRFVTGHFGGLHPANGGGGGSGGGSRDWDFDVFGGGTPVGGHHHHHH

SEQ ID NO: 428 - protein, 571 aa, Artificial Sequence
  Synthetic polypeptide
QRFVTGHFGGLHPANGGGGGSQVQLQESGPGLVKPSQTLSLTCTVSGGSISSGGYYWSWIRQHPGKGLEWIGYIYYRGRTYYNPSLKSRVTISVDTSKNQFSLKLSSVTAADTAVYYCARVYSNYGWFDPWGQGTLVTVSSGGGGSGGGGSGGGGSEIVLTQSPGTLSLSPGERATLSCRASQSVSSSYLAWYQQKPGQAPRLLIYGASSRATGIPDRFSGSGSGTDFTLTISRLEPEDFAVYYCQQYGSSPLTFGGGTKLEIKSGGGGSEVQLVESGGGLVQPGGSLKLSCAASGFTFNKYAMNWVRQAPGKGLEWVARIRSKYNNYATYYADSVKDRFTISRDDSKNTAYLQMNNLKTEDTAVYYCVRHGNFGNSYISYWAYWGQGTLVTVSSGGGGSGGGGSGGGGSQTVVTQEPSLTVSPGGTVTLTCGSSTGAVTSGNYPNWVQQKPGQAPRGLIGGTKFLAPGTPARFSGSLLGGKAALTLSGVQPEDEAEYYCVLWYSNRWVFGGGTKLTVLGGGGSQRFVTGHFGGLHPANGGGGGSGGGSRDWDFDVFGGGTPVGGHHHHHH

SEQ ID NO: 429 - protein, 570 aa, Artificial Sequence
  Synthetic polypeptide
QRFVTGHFGGLHPANGGGGGSQVQLQESGPGLVKPSETLSLTCTVSGGSISSGGYYWSWIRQHPGKGLEWIGYIFYRGRTYYNPSLKSRVTISVDTSKNQFSLKLSSVTAADTAVYYCARVYSNYGWFDPWGQGTLVTVSSGGGGSGGGGSGGGGSEIVLTQSPGTLSLSPGERATLSCRASQSVSSSYLAWYQQKPGQAPRLLIYGASSRATGIPDRFSGSGSGTDFTLTISRLEPEDFAVYYCQQYGSSPTFGGGTKVEIKSGGGGSEVQLVESGGGLVQPGGSLKLSCAASGFTFNKYAMNWVRQAPGKGLEWVARIRSKYNNYATYYADSVKDRFTISRDDSKNTAYLQMNNLKTEDTAVYYCVRHGNFGNSYISYWAYWGQGTLVTVSSGGGGSGGGGSGGGGSQTVVTQEPSLTVSPGGTVTLTCGSSTGAVTSGNYPNWVQQKPGQAPRGLIGGTKFLAPGTPARFSGSLLGGKAALTLSGVQPEDEAEYYCVLWYSNRWVFGGGTKLTVLGGGGSQRFVTGHFGGLHPANGGGGGSGGGSRDWDFDVFGGGTPVGGHHHHHH

SEQ ID NO: 430 - protein, 571 aa, Artificial Sequence
  Synthetic polypeptide
QRFVTGHFGGLHPANGGGGGSQVQLQESGPGLVKPSQTLSLTCTVSGGSISSGGYYWSWIRQHPGKGLEWIGYIFYRGRTYYNPSLKSRVTISVDTSKNQFSLKLSSVTAADTAVYYCARVYSNYGWFDPWGQGTLVTVSSGGGGSGGGGSGGGGSEIVLTQSPGTLSLSPGERATLSCRASQSVSSSYLAWYQQKPGQAPRLLIYGASSRATGIPDRFSGSGSGTDFTLTISRLEPEDFAVYYCQQYGSSPLTFGGGTKVEIKSGGGGSEVQLVESGGGLVQPGGSLKLSCAASGFTFNKYAMNWVRQAPGKGLEWVARIRSKYNNYATYYADSVKDRFTISRDDSKNTAYLQMNNLKTEDTAVYYCVRHGNFGNSYISYWAYWGQGTLVTVSSGGGGSGGGGSGGGGSQTVVTQEPSLTVSPGGTVTLTCGSSTGAVTSGNYPNWVQQKPGQAPRGLIGGTKFLAPGTPARFSGSLLGGKAALTLSGVQPEDEAEYYCVLWYSNRWVFGGGTKLTVLGGGGSQRFVTGHFGGLHPANGGGGGSGGGSRDWDFDVFGGGTPVGGHHHHHH

SEQ ID NO: 431 - protein, 570 aa, Artificial Sequence
  Synthetic polypeptide
QRFVTGHFGGLHPANGGGGGSQVQLQESGPGLVKPSQTLSLTCTVSGGSISSGGYYWSWIRQHPGKGLEWIGYIYYRGRTYYNPSLKSRVTISVDTSKNQFSLKLSSVTAADTAVYYCARVYSNYGWFDPWGQGTLVTVSSGGGGSGGGGSGGGGSEIVLTQSPGTLSLSPGERATLSCRASQSVSSSYLAWYQQKPGQAPRLLIYGASSRATGIPDRFSGSGSGTDFTLTISRLEPEDFAVYYCQQYGSSPTFGPGTKVEIKSGGGGSEVQLVESGGGLVQPGGSLKLSCAASGFTFNKYAMNWVRQAPGKGLEWVARIRSKYNNYATYYADSVKDRFTISRDDSKNTAYLQMNNLKTEDTAVYYCVRHGNFGNSYISYWAYWGQGTLVTVSSGGGGSGGGGSGGGGSQTVVTQEPSLTVSPGGTVTLTCGSSTGAVTSGNYPNWVQQKPGQAPRGLIGGTKFLAPGTPARFSGSLLGGKAALTLSGVQPEDEAEYYCVLWYSNRWVFGGGTKLTVLGGGGSQRFVTGHFGGLHPANGGGGGSGGGSRDWDFDVFGGGTPVGGHHHHHH

SEQ ID NO: 432 - protein, 570 aa, Artificial Sequence
  Synthetic polypeptide
QRFVTGHFGGLHPANGGGGGSQVQLQESGPGLVKPSQTLSLTCTVSGGSISSGGYYWSWIRQHPGKGLEWIGYIYYRGRTYYNPSLKSRVTISVDTSKNQFSLKLSSVTAADTAVYYCARVYSNYGWFDPWGQGTLVTVSSGGGGSGGGGSGGGGSEIVLTQSPGTLSLSPGERATLSCRASQSVSSSYLAWYQQKPGQAPRLLIYGASSRATGIPDRFSGSGSGTDFTLTISRLEPEDFAVYYCQQYGSSPTFGGGTKVEIKSGGGGSEVQLVESGGGLVQPGGSLKLSCAASGFTFNKYAMNWVRQAPGKGLEWVARIRSKYNNYATYYADSVKDRFTISRDDSKNTAYLQMNNLKTEDTAVYYCVRHGNFGNSYISYWAYWGQGTLVTVSSGGGGSGGGGSGGGGSQTVVTQEPSLTVSPGGTVTLTCGSSTGAVTSGNYPNWVQQKPGQAPRGLIGGTKFLAPGTPARFSGSLLGGKAALTLSGVQPEDEAEYYCVLWYSNRWVFGGGTKLTVLGGGGSQRFVTGHFGGLHPANGGGGGSGGGSRDWDFDVFGGGTPVGGHHHHHH

SEQ ID NO: 433 - protein, 570 aa, Artificial Sequence
  Synthetic polypeptide
QRFVTGHFGGLHPANGGGGGSQVQLQESGPGLVKPSQTLSLTCTISGGSISSGGYYWSWIRQHPGKGLEWIGYIFYSGRTYYNPSLKSRVTISVDTSKNQFSLKLTSVTAADTAVYYCARVNSNYGWFDPWGQGTLVTVSSGGGGSGGGGSGGGGSEIVLTQSPGTLSLSPGERATLSCRASQSVSSSYLAWYQQKPGQAPRLLIYGASSRATGIPDRFSGSGSGTDFTLTISRLEPEDFAVYYCQQYGSSPTFGGGTKVEIKSGGGGSEVQLVESGGGLVQPGGSLKLSCAASGFTFNKYAMNWVRQAPGKGLEWVARIRSKYNNYATYYADSVKDRFTISRDDSKNTAYLQMNNLKTEDTAVYYCVRHGNFGNSYISYWAYWGQGTLVTVSSGGGGSGGGGSGGGGSQTVVTQEPSLTVSPGGTVTLTCGSSTGAVTSGNYPNWVQQKPGQAPRGLIGGTKFLAPGTPARFSGSLLGGKAALTLSGVQPEDEAEYYCVLWYSNRWVFGGGTKLTVLGGGGSQRFVTGHFGGLHPANGGGGGSGGGSRDWDFDVFGGGTPVGGHHHHHH

SEQ ID NO: 434 - protein, 571 aa, Artificial Sequence
  Synthetic polypeptide
QRFVTGHFGGLHPANGGGGGSQVQLQESGPGLVKPSQTLSLTCTVSGGSISSGGYYWSWIRQHPGKGLDWIGYIFYRGRTYYNPSLKSRVTISVDTSKNQFSLKLSSVTAADTAVYYCARVNSNYGWFDPWGQGTLVTVSSGGGGSGGGGSGGGGSEIVLTQSPGTLSLSPGERATLSCRASQSVSSSYLAWYQQKPGQAPRLLIYGASSRATGIPDRFSGSGSGTDFTLTISRLEPEDFAVYYCQQYGSSPLTFGGGTKVEIKSGGGGSEVQLVESGGGLVQPGGSLKLSCAASGFTFNKYAMNWVRQAPGKGLEWVARIRSKYNNYATYYADSVKDRFTISRDDSKNTAYLQMNNLKTEDTAVYYCVRHGNFGNSYISYWAYWGQGTLVTVSSGGGGSGGGGSGGGGSQTVVTQEPSLTVSPGGTVTLTCGSSTGAVTSGNYPNWVQQKPGQAPRGLIGGTKFLAPGTPARFSGSLLGGKAALTLSGVQPEDEAEYYCVLWYSNRWVFGGGTKLTVLGGGGSQRFVTGHFGGLHPANGGGGGSGGGSRDWDFDVFGGGTPVGGHHHHHH

SEQ ID NO: 435 - protein, 570 aa, Artificial Sequence
  Synthetic polypeptide
QRFVTGHFGGLHPANGGGGGSQVQLQESGPGLVKPSQTLSLTCTVSGGSISSGGYYWSWIRQHPGKGLEWIGYIYYRGRTYYNPSLKSRVTISVDTSKNQFSLKLSSVTAADTAVYYCARVYSNYGWFDPWGQGTLVTVSSGGGGSGGGGSGGGGSEIVLTQSPGTLSLSPGERATLSCRASQSVSSSYLAWYQQKPGQAPRLLIYGASTRATGIPDRFSGSGSGTDFTLTISRLEPEDFAVYYCQQYGSSPSFGQGTKVEIKSGGGGSEVQLVESGGGLVQPGGSLKLSCAASGFTFNKYAMNWVRQAPGKGLEWVARIRSKYNNYATYYADSVKDRFTISRDDSKNTAYLQMNNLKTEDTAVYYCVRHGNFGNSYISYWAYWGQGTLVTVSSGGGGSGGGGSGGGGSQTVVTQEPSLTVSPGGTVTLTCGSSTGAVTSGNYPNWVQQKPGQAPRGLIGGTKFLAPGTPARFSGSLLGGKAALTLSGVQPEDEAEYYCVLWYSNRWVFGGGTKLTVLGGGGSQRFVTGHFGGLHPANGGGGGSGGGSRDWDFDVFGGGTPVGGHHHHHH

SEQ ID NO: 436 - protein, 571 aa, Artificial Sequence
  Synthetic polypeptide
QRFVTGHFGGLHPANGGGGGSQVQLQESGPGLVRPSQTLSLTCTVSGGSISSGGYYWSWIRQHPGKGLEWIGYIYYRGRTYYNPSLKSRVTISVDTSKNQFSLKLSSVTAADTAVYYCARVYSNYGWFDPWGQGTLVTVSSGGGGSGGGGSGGGGSEIVLTQSPGTLSLSPGERATLSCRASQSVSSSYLAWYQQKPGQAPRLLIYGASSRATGIPDRFSGSGSGTDFTLTISRLEPEDFAVYYCQQYDTSPLTFGGGTKVEIKSGGGGSEVQLVESGGGLVQPGGSLKLSCAASGFTFNKYAMNWVRQAPGKGLEWVARIRSKYNNYATYYADSVKDRFTISRDDSKNTAYLQMNNLKTEDTAVYYCVRHGNFGNSYISYWAYWGQGTLVTVSSGGGGSGGGGSGGGGSQTVVTQEPSLTVSPGGTVTLTCGSSTGAVTSGNYPNWVQQKPGQAPRGLIGGTKFLAPGTPARFSGSLLGGKAALTLSGVQPEDEAEYYCVLWYSNRWVFGGGTKLTVLGGGGSQRFVTGHFGGLHPANGGGGGSGGGSRDWDFDVFGGGTPVGGHHHHHH

SEQ ID NO: 437 - protein, 570 aa, Artificial Sequence; identical to SEQ ID NO: 432
  Synthetic polypeptide

SEQ ID NO: 438 - protein, 571 aa, Artificial Sequence
  Synthetic polypeptide
QRFVTGHFGGLHPANGGGGGSQVQLQESGPGLVKPSQTLSLTCTVSGGSISSGGYYWSWIRQHPGKGLEWIGYIYYRGRTYYNPSLKSRVTISVDTSKNQFSLKLSSVTAADTAVYYCARVYSNYGWFDPWGQGTLVTVSSGGGGSGGGGSGGGGSEIVLTQSPGTLSLSPGERATLSCRASQSVSSSYLAWYQQKPGQAPRLLIYGASSRATGIPDRFSGSGSGTDFTLTISRLEPEDFAVYYCQQYGSSPLTFGGGTKVEIKSGGGGSEVQLVESGGGLVQPGGSLKLSCAASGFTFNKYAMNWVRQAPGKGLEWVARIRSKYNNYATYYADSVKDRFTISRDDSKNTAYLQMNNLKTEDTAVYYCVRHGNFGNSYISYWAYWGQGTLVTVSSGGGGSGGGGSGGGGSQTVVTQEPSLTVSPGGTVTLTCGSSTGAVTSGNYPNWVQQKPGQAPRGLIGGTKFLAPGTPARFSGSLLGGKAALTLSGVQPEDEAEYYCVLWYSNRWVFGGGTKLTVLGGGGSQRFVTGHFGGLHPANGGGGGSGGGSRDWDFDVFGGGTPVGGHHHHHH

SEQ ID NO: 439 - protein, 571 aa, Artificial Sequence
  Synthetic polypeptide
QRFVTGHFGGLHPANGGGGGSQVQLQESGPGLVKPSQTLSLTCTVSGGSISSGGYYWSWVRQHPGKGLEWIGYIFYSGRTYYNPSLKSRVIISVDTSKNQFSLKLSSVTAADTAVYYCARVYSNYGWFDPWGQGTLVTVSSGGGGSGGGGSGGGGSEIVLTQSPGTLSLSPGERATLSCRASQSVSSSYLAWYQQKPGQAPRLLIYGASSRATGIPDRFSGSGSGTDFTLTISRLEPEDFAVYYCQQYGSSPLTFGGGTKVEIKSGGGGSEVQLVESGGGLVQPGGSLKLSCAASGFTFNKYAMNWVRQAPGKGLEWVARIRSKYNNYATYYADSVKDRFTISRDDSKNTAYLQMNNLKTEDTAVYYCVRHGNFGNSYISYWAYWGQGTLVTVSSGGGGSGGGGSGGGGSQTVVTQEPSLTVSPGGTVTLTCGSSTGAVTSGNYPNWVQQKPGQAPRGLIGGTKFLAPGTPARFSGSLLGGKAALTLSGVQPEDEAEYYCVLWYSNRWVFGGGTKLTVLGGGGSQRFVTGHFGGLHPANGGGGGSGGGSRDWDFDVFGGGTPVGGHHHHHH

SEQ ID NO: 440 - protein, 571 aa, Artificial Sequence
  Synthetic polypeptide
QRFVTGHFGGLHPANGGGGGSQVQLQESGPGLVKPSQTLSLTCTVSGGSISSGGYYWSWIRQHPGKGLEWIGYIFYSGRTYYNPSLKSRVTISVDTSKNQFSLKLSSVTAADTAVYYCARVYSNYGWFDPWGQGTLVTVSSGGGGSGGGGSGGGGSEIVLTQSPGTLSLSPGERATLSCRASQSVSSSYLAWYQQKPGQAPRLLIYGASSRATGIPDRFSGSGSGTDFTLTISRLEPEDFAVYYCQQYGSSPLTFGGGTKVEIKSGGGGSEVQLVESGGGLVQPGGSLKLSCAASGFTFNKYAMNWVRQAPGKGLEWVARIRSKYNNYATYYADSVKDRFTISRDDSKNTAYLQMNNLKTEDTAVYYCVRHGNFGNSYISYWAYWGQGTLVTVSSGGGGSGGGGSGGGGSQTVVTQEPSLTVSPGGTVTLTCGSSTGAVTSGNYPNWVQQKPGQAPRGLIGGTKFLAPGTPARFSGSLLGGKAALTLSGVQPEDEAEYYCVLWYSNRWVFGGGTKLTVLGGGGSQRFVTGHFGGLHPANGGGGGSGGGSRDWDFDVFGGGTPVGGHHHHHH

SEQ ID NO: 441 - protein, 571 aa, Artificial Sequence
  Synthetic polypeptide
QRFVTGHFGGLHPANGGGGGSQVQLQESGPGLVKPSQTLSLTCTVSGGSISSGGYYWSWIRQHPGKGLEWIGYIFYSGRTYYNPSLKSRVSISVDTSKNQFSLKLSSVTAADTAVYYCARVYSNYGWFDPWGQGTLVTVSSGGGGSGGGGSGGGGSEIVLTQSPGTLSLSPGERATLSCRASQSVSSSYLAWYQQKPGQAPRLLIYGASSRATGIPDRFSGSGSGTDFTLTISRLEPEDFAVYYCQQYGSSPLTFGGGTKVEIKSGGGGSEVQLVESGGGLVQPGGSLKLSCAASGFTFNKYAMNWVRQAPGKGLEWVARIRSKYNNYATYYADSVKDRFTISRDDSKNTAYLQMNNLKTEDTAVYYCVRHGNFGNSYISYWAYWGQGTLVTVSSGGGGSGGGGSGGGGSQTVVTQEPSLTVSPGGTVTLTCGSSTGAVTSGNYPNWVQQKPGQAPRGLIGGTKFLAPGTPARFSGSLLGGKAALTLSGVQPEDEAEYYCVLWYSNRWVFGGGTKLTVLGGGGSQRFVTGHFGGLHPANGGGGGSGGGSRDWDFDVFGGGTPVGGHHHHHH

SEQ ID NO: 442 - protein, 571 aa, Artificial Sequence
  Synthetic polypeptide
QRFVTGHFGGLHPANGGGGGSQVQLQESGPGLVKPSETLSLTCTVSGGSVSSGGYYWSWIRQPPGKGLEWIGYIYYRGRTYYNPSLKSRVTISVDTSKNQFSLKLSSVTAADTAVYYCARVYSNYGWFDPWGQGTLVTVSSGGGGSGGGGSGGGGSEIVLTQSPGTLSLSPGERATLSCRASQSVSSSYLAWYQQKPGQAPRLLIYGASSRATGIPDRFSGSGSGTDFTLTISRLEPEDFAVYYCQQYGSSPLTFGGGTKVEIKSGGGGSEVQLVESGGGLVQPGGSLKLSCAASGFTFNKYAMNWVRQAPGKGLEWVARIRSKYNNYATYYADSVKDRFTISRDDSKNTAYLQMNNLKTEDTAVYYCVRHGNFGNSYISYWAYWGQGTLVTVSSGGGGSGGGGSGGGGSQTVVTQEPSLTVSPGGTVTLTCGSSTGAVTSGNYPNWVQQKPGQAPRGLIGGTKFLAPGTPARFSGSLLGGKAALTLSGVQPEDEAEYYCVLWYSNRWVFGGGTKLTVLGGGGSQRFVTGHFGGLHPANGGGGGSGGGSRDWDFDVFGGGTPVGGHHHHHH

SEQ ID NO: 443 - protein, 570 aa, Artificial Sequence
  Synthetic polypeptide
QRFVTGHFGGLHPANGGGGGSQVQLQESGPGLVKPSQTLSLTCTVSGGSISSGGYYWSWIRQHPGKGLEWIGYIYYRGRTYYNPSLKSRVTISVDTSKNQFSLKLSSVTAADTAVYYCARVYSNYGWFDPWGQGTLVTVSSGGGGSGGGGSGGGGSEIVLTQSPGTLSLSPGERATLSCRASQSVSSSYLAWYQQKPGQAPRLLIYGASSRATGIPDRFSGSGSGTDFTLTISRLEPEDFAVYYCQQYGSSPTFGQGTRLEIKSGGGGSEVQLVESGGGLVQPGGSLKLSCAASGFTFNKYAMNWVRQAPGKGLEWVARIRSKYNNYATYYADSVKDRFTISRDDSKNTAYLQMNNLKTEDTAVYYCVRHGNFGNSYISYWAYWGQGTLVTVSSGGGGSGGGGSGGGGSQTVVTQEPSLTVSPGGTVTLTCGSSTGAVTSGNYPNWVQQKPGQAPRGLIGGTKFLAPGTPARFSGSLLGGKAALTLSGVQPEDEAEYYCVLWYSNRWVFGGGTKLTVLGGGGSQRFVTGHFGGLHPANGGGGGSGGGSRDWDFDVFGGGTPVGGHHHHHH

SEQ ID NO: 444 - protein, 571 aa, Artificial Sequence
  Synthetic polypeptide
QRFVTGHFGGLHPANGGGGGSQVQLQESGPGLVKPSQTLSLTCTVSGGSISSGGYYWSWIRQHPGKGLEWIGYIFYSGKTYYNPSLKSRVSISVDTSKNQFSLKLSSVTAADTAVYYCARVYSNYGWFDPWGQGTLVTVSSGGGGSGGGGSGGGGSEIVLTQSPGTLSLSPGERATLSCRASQSVSSSYLAWYQQKPGQAPRLLIYGASSRATGIPDRFSGSGSGTDFTLTISRLEPEDFAVYYCQQYGSSPITFGQGTRLEIKSGGGGSEVQLVESGGGLVQPGGSLKLSCAASGFTFNKYAMNWVRQAPGKGLEWVARIRSKYNNYATYYADSVKDRFTISRDDSKNTAYLQMNNLKTEDTAVYYCVRHGNFGNSYISYWAYWGQGTLVTVSSGGGGSGGGGSGGGGSQTVVTQEPSLTVSPGGTVTLTCGSSTGAVTSGNYPNWVQQKPGQAPRGLIGGTKFLAPGTPARFSGSLLGGKAALTLSGVQPEDEAEYYCVLWYSNRWVFGGGTKLTVLGGGGSQRFVTGHFGGLHPANGGGGGSGGGSRDWDFDVFGGGTPVGGHHHHHH

SEQ ID NO: 445 - protein, 576 aa, Artificial Sequence
  Synthetic polypeptide
QRFVTGHFGGLHPANGGGGGSQVQLQESGPGLVKPSETLSLTCTVSGGSISSYYWSWIRQPPGKGLEWIGYIYYSGSTNYNPSLKSRVTMSIDTSKNQFSLKLISVTAADTAVYYCARDQRRIVAAGGYYYGMDVWGQGTTVTVSSGGGGSGGGGSGGGGSEIVLTQSPGTLSLSPGERATLSCRASQSVSSSYLAWYQQKPGQAPRLLIYGASTRATGIPARFSGSGSGTDFTLTISRLEPEDFAVYYCQQYGSSPFTFGPGTKVDIKSGGGGSEVQLVESGGGLVQPGGSLKLSCAASGFTFNKYAMNWVRQAPGKGLEWVARIRSKYNNYATYYADSVKDRFTISRDDSKNTAYLQMNNLKTEDTAVYYCVRHGNFGNSYISYWAYWGQGTLVTVSSGGGGSGGGGSGGGGSQTVVTQEPSLTVSPGGTVTLTCGSSTGAVTSGNYPNWVQQKPGQAPRGLIGGTKFLAPGTPARFSGSLLGGKAALTLSGVQPEDEAEYYCVLWYSNRWVFGGGTKLTVLGGGGSQRFVTGHFGGLHPANGGGGGSGGGSRDWDFDVFGGGTPVGGHHHHHH

SEQ ID NO: 446 - protein, 570 aa, Artificial Sequence
  Synthetic polypeptide
QRFVTGHFGGLHPANGGGGGSQVQLQESGPGLVKPSQTLSLTCTVSGGSISSNDYYWSWIRQHPGKGLEWIGYIYYSGSTFYNPSLKSRGAISVDTSKNQFSLKLTSVTAADTAVYYCARGVYRTGAFDIWGQGTMVTVSSGGGGSGGGGSGGGGSDIQMTQSPSSLSASVGDRVTITCRASQSISSYLNWYQQKPGKAPKSLIYAASSLQSGVPSKFSGSGSGTDFTLTISSLQPEDIATYYCQQSYSTPQAFGGGTKVDIKSGGGGSEVQLVESGGGLVQPGGSLKLSCAASGFTFNKYAMNWVRQAPGKGLEWVARIRSKYNNYATYYADSVKDRFTISRDDSKNTAYLQMNNLKTEDTAVYYCVRHGNFGNSYISYWAYWGQGTLVTVSSGGGGSGGGGSGGGGSQTVVTQEPSLTVSPGGTVTLTCGSSTGAVTSGNYPNWVQQKPGQAPRGLIGGTKFLAPGTPARFSGSLLGGKAALTLSGVQPEDEAEYYCVLWYSNRWVFGGGTKLTVLGGGGSQRFVTGHFGGLHPANGGGGGSGGGSRDWDFDVFGGGTPVGGHHHHHH

SEQ ID NO: 447 - protein, 571 aa, Artificial Sequence
  Synthetic polypeptide
QRFVTGHFGGLHPANGGGGGSQVQLVQSGAEVKKPGASVKVSCKASGYTFTYYGISWVRQAPGQGLEWMGWINPYGGETNYAQKLQGRVTMTTDTSTSTAYMELRSLRSDDTAVYYCARGSGGFDYWGQGTLVTVSSGGGGSGGGGSGGGGSDIVMTQTPLSLSVTPGEPASISCRSSQSLLHSNGYNYLDWYLQKPGQSPQLLIYLGSYRASGVPDRFSGSGSGTDFTLKISRVEAEDVGVYYCMQALQTPFTFGPGTKVDIKSGGGGSEVQLVESGGGLVQPGGSLKLSCAASGFTFNKYAMNWVRQAPGKGLEWVARIRSKYNNYATYYADSVKDRFTISRDDSKNTAYLQMNNLKTEDTAVYYCVRHGNFGNSYISYWAYWGQGTLVTVSSGGGGSGGGGSGGGGSQTVVTQEPSLTVSPGGTVTLTCGSSTGAVTSGNYPNWVQQKPGQAPRGLIGGTKFLAPGTPARFSGSLLGGKAALTLSGVQPEDEAEYYCVLWYSNRWVFGGGTKLTVLGGGGSQRFVTGHFGGLHPANGGGGGSGGGSRDWDFDVFGGGTPVGGHHHHHH

SEQ ID NO: 448 - protein, 571 aa, Artificial Sequence
  Synthetic polypeptide
QRFVTGHFGGLHPANGGGGGSQVQLVQSGAEVKKPGASVKVSCKASGYTFTYYGISWVRQAPGQGLEWMGWINPYSGATNYAQKLQGRVTMTTDTSTSTAYMELRSLRSDDTAVYYCARGSGGFDYWGQGTLVTVSSGGGGSGGGGSGGGGSDIVMTQTPLSLSVTPGEPASISCRSSQSLLHSNGYNYLDWYLQKPGQSPQLLIYLGSYRASGVPDRFSGSGSGTDFTLKISRVEAEDVGVYYCMQALQTPFTFGPGTKVDIKSGGGGSEVQLVESGGGLVQPGGSLKLSCAASGFTFNKYAMNWVRQAPGKGLEWVARIRSKYNNYATYYADSVKDRFTISRDDSKNTAYLQMNNLKTEDTAVYYCVRHGNFGNSYISYWAYWGQGTLVTVSSGGGGSGGGGSGGGGSQTVVTQEPSLTVSPGGTVTLTCGSSTGAVTSGNYPNWVQQKPGQAPRGLIGGTKFLAPGTPARFSGSLLGGKAALTLSGVQPEDEAEYYCVLWYSNRWVFGGGTKLTVLGGGGSQRFVTGHFGGLHPANGGGGGSGGGSRDWDFDVFGGGTPVGGHHHHHH

SEQ ID NO: 449 - protein, 571 aa, Artificial Sequence
  Synthetic polypeptide
QRFVTGHFGGLHPANGGGGGSQVQLVQSGAEVKKPGASVKVSCKASGYTFTYYGISWVRQAPGQGLEWMGWINPYTGKTNYAQKLQGRVTMTTDTSTSTAYMELRSLRSDDTAVYYCARGSGGFDYWGQGTLVTVSSGGGGSGGGGSGGGGSDIVMTQTPLSLSVTPGEPASISCRSSQSLLHSNGYNYLDWYLQKPGQSPQLLIYLGSYRASGVPDRFSGSGSGTDFTLKISRVEAEDVGVYYCMQALQTPFTFGPGTKVDIKSGGGGSEVQLVESGGGLVQPGGSLKLSCAASGFTFNKYAMNWVRQAPGKGLEWVARIRSKYNNYATYYADSVKDRFTISRDDSKNTAYLQMNNLKTEDTAVYYCVRHGNFGNSYISYWAYWGQGTLVTVSSGGGGSGGGGSGGGGSQTVVTQEPSLTVSPGGTVTLTCGSSTGAVTSGNYPNWVQQKPGQAPRGLIGGTKFLAPGTPARFSGSLLGGKAALTLSGVQPEDEAEYYCVLWYSNRWVFGGGTKLTVLGGGGSQRFVTGHFGGLHPANGGGGGSGGGSRDWDFDVFGGGTPVGGHHHHHH

SEQ ID NO: 450 - protein, 571 aa, Artificial Sequence
  Synthetic polypeptide
QRFVTGHFGGLHPANGGGGGSQVQLVQSGAEVKKPGASVKVSCKASGYTFTYYGISWVRQAPGQGLEWMGWINPYTGKTNYAQKLQGRVTMTTDTSTSTAYMELRSLRSDDTAVYYCARGSGGFDYWGQGTLVTVSSGGGGSGGGGSGGGGSDIVMTQTPLSLSVTPGEPASISCRSSQSLLHSVGYNYLDWYLQKPGQSPQLLIYLGSYRASGVPDRFSGSGSGTDFTLKISRVEAEDVGVYYCMQALQTPFTFGPGTKVDIKSGGGGSEVQLVESGGGLVQPGGSLKLSCAASGFTFNKYAMNWVRQAPGKGLEWVARIRSKYNNYATYYADSVKDRFTISRDDSKNTAYLQMNNLKTEDTAVYYCVRHGNFGNSYISYWAYWGQGTLVTVSSGGGGSGGGGSGGGGSQTVVTQEPSLTVSPGGTVTLTCGSSTGAVTSGNYPNWVQQKPGQAPRGLIGGTKFLAPGTPARFSGSLLGGKAALTLSGVQPEDEAEYYCVLWYSNRWVFGGGTKLTVLGGGGSQRFVTGHFGGLHPANGGGGGSGGGSRDWDFDVFGGGTPVGGHHHHHH

SEQ ID NO: 451 - protein, 571 aa, Artificial Sequence
  Synthetic polypeptide
QRFVTGHFGGLHPANGGGGGSQVQLVQSGAEVKKPGASVKVSCKASGYTFTSYGISWVRQAPGQGLEWMGWINPYTGNRNYAQKVQDRVTMTTDTSTNTAYMELSSLRSDDTAVYYCARGSGGFDYWGQGTLVTVSSGGGGSGGGGSGGGGSDIVMTQSPLSLPVTLGQPASISCRSSQSLLHSVGYNYLDWYLQKPGQSPQLLIYLGSNRASGVPDRFSGSGSGTDFTLKISRVEAEDVGVYYCMQALQTPFTFGPGTKLEIKSGGGGSEVQLVESGGGLVQPGGSLKLSCAASGFTFNKYAMNWVRQAPGKGLEWVARIRSKYNNYATYYADSVKDRFTISRDDSKNTAYLQMNNLKTEDTAVYYCVRHGNFGNSYISYWAYWGQGTLVTVSSGGGGSGGGGSGGGGSQTVVTQEPSLTVSPGGTVTLTCGSSTGAVTSGNYPNWVQQKPGQAPRGLIGGTKFLAPGTPARFSGSLLGGKAALTLSGVQPEDEAEYYCVLWYSNRWVFGGGTKLTVLGGGGSQRFVTGHFGGLHPANGGGGGSGGGSRDWDFDVFGGGTPVGGHHHHHH

SEQ ID NO: 452 - protein, 571 aa, Artificial Sequence
  Synthetic polypeptide
QRFVTGHFGGLHPANGGGGGSQVQLVQSGAEVKKPGASVKVSCKASGYTFTYYGISWVRQAPGQGLEWMGWINPYTGKTNYAQKLQDRVTMTTDTSTNTAYMELRSLRSDDTAVYYCARGSGGFDYWGQGTLVTVSSGGGGSGGGGSGGGGSDIVMTQTPLSLPVTPGEPASISCRSSQSLLHSVGYNYLDWYLQKPGQSPQLLIYLGSNRASGVPDRFSGSGSGTDFTLKISRVEAEDVGVYYCMQALQTPFTFGPGTKVDIKSGGGGSEVQLVESGGGLVQPGGSLKLSCAASGFTFNKYAMNWVRQAPGKGLEWVARIRSKYNNYATYYADSVKDRFTISRDDSKNTAYLQMNNLKTEDTAVYYCVRHGNFGNSYISYWAYWGQGTLVTVSSGGGGSGGGGSGGGGSQTVVTQEPSLTVSPGGTVTLTCGSSTGAVTSGNYPNWVQQKPGQAPRGLIGGTKFLAPGTPARFSGSLLGGKAALTLSGVQPEDEAEYYCVLWYSNRWVFGGGTKLTVLGGGGSQRFVTGHFGGLHPANGGGGGSGGGSRDWDFDVFGGGTPVGGHHHHHH

SEQ ID NO: 453 - protein, 571 aa, Artificial Sequence
  Synthetic polypeptide
QRFVTGHFGGLHPANGGGGGSQVQLVQSGAEVKKPGASVKVSCKASGYTFTTYGISWVRQAPGQGLEWMGWINPYTGKTNYAQKLQGRVTMATDTSTSTAYMELRSLRSDDTAVYYCARGSGGFDYWGQGTLVTVSSGGGGSGGGGSGGGGSDIVMTQSPLSLPVTPGEPASISCRSSQSLLHSVGYNYLDWYLQKPGQSPQLLIYLGSNRASGVPDRFSGSGSGTDFTLKISRVEAEDVGVYYCMQALQTPFTFGPGTKLEIKSGGGGSEVQLVESGGGLVQPGGSLKLSCAASGFTFNKYAMNWVRQAPGKGLEWVARIRSKYNNYATYYADSVKDRFTISRDDSKNTAYLQMNNLKTEDTAVYYCVRHGNFGNSYISYWAYWGQGTLVTVSSGGGGSGGGGSGGGGSQTVVTQEPSLTVSPGGTVTLTCGSSTGAVTSGNYPNWVQQKPGQAPRGLIGGTKFLAPGTPARFSGSLLGGKAALTLSGVQPEDEAEYYCVLWYSNRWVFGGGTKLTVLGGGGSQRFVTGHFGGLHPANGGGGGSGGGSRDWDFDVFGGGTPVGGHHHHHH

SEQ ID NO: 454 - protein, 571 aa, Artificial Sequence
  Synthetic polypeptide
QRFVTGHFGGLHPANGGGGGSQVQLVQSGAEVKEPGASVKVSCKASGYTFTYYGISWVRQAPGQGLEWMGWINPYTGNRNYAQKVQDRVTMTTDTSTNTAYMELRSLRSDDTAVYYCARGSGGFDYWGQGTLVTVSSGGGGSGGGGSGGGGSDIVMTQSPLSLPVTPGEPASISCRSSQSLLHSVGYNYLDWYLQKPGQSPQLLIYLGSNRASGVPDRFSGSGSGTDFTLKISRVEAEDVGVYYCMQALQTPFTFGPGTKLEIKSGGGGSEVQLVESGGGLVQPGGSLKLSCAASGFTFNKYAMNWVRQAPGKGLEWVARIRSKYNNYATYYADSVKDRFTISRDDSKNTAYLQMNNLKTEDTAVYYCVRHGNFGNSYISYWAYWGQGTLVTVSSGGGGSGGGGSGGGGSQTVVTQEPSLTVSPGGTVTLTCGSSTGAVTSGNYPNWVQQKPGQAPRGLIGGTKFLAPGTPARFSGSLLGGKAALTLSGVQPEDEAEYYCVLWYSNRWVFGGGTKLTVLGGGGSQRFVTGHFGGLHPANGGGGGSGGGSRDWDFDVFGGGTPVGGHHHHHH

SEQ ID NO: 455 - protein, 571 aa, Artificial Sequence
  Synthetic polypeptide
QRFVTGHFGGLHPANGGGGGSQVQLVQSGAEVKKPGASVKVSCKASGYTFTYYGISWVRQAPGQGLEWMGWINPYTGKTNYAQKLQGRVTMTTDTSTSTAYMELRSLRSDDTAVYYCARGSGGFDYWGQGTLVTVSSGGGGSGGGGSGGGGSDIVMTQSPLSLPVTPGEPASISCRSSQSLLHSVGYNYLDWYLQKPGQSPQLLIYLGSNRASGVPDRFSGSGSGTDFTLKISRVEAEDVGVYYCMQALQTPFTFGPGTKVEIKSGGGGSEVQLVESGGGLVQPGGSLKLSCAASGFTFNKYAMNWVRQAPGKGLEWVARIRSKYNNYATYYADSVKDRFTISRDDSKNTAYLQMNNLKTEDTAVYYCVRHGNFGNSYISYWAYWGQGTLVTVSSGGGGSGGGGSGGGGSQTVVTQEPSLTVSPGGTVTLTCGSSTGAVTSGNYPNWVQQKPGQAPRGLIGGTKFLAPGTPARFSGSLLGGKAALTLSGVQPEDEAEYYCVLWYSNRWVFGGGTKLTVLGGGGSQRFVTGHFGGLHPANGGGGGSGGGSRDWDFDVFGGGTPVGGHHHHHH

SEQ ID NO: 456 - protein, 571 aa, Artificial Sequence
  Synthetic polypeptide
QRFVTGHFGGLHPANGGGGGSQVQLVQSGAEVKKPGASVKVSCKASGYTFTSYGITWVRQAPGQGLEWMGWINPYTGNRNYAQKVQGRVTMTTDTSTSTAYMELRSLRSDDTAVYYCARGSGGFDYWGQGTLVTVSSGGGGSGGGGSGGGGSDIVMTQSPLSLSVTPGEPASISCRSSQSLLHSVGYNYLDWYLQKPGQSPQLLIYLGSNRASGVPDRFSGSGSGTDFTLKISRVEAEDVGVYYCMQALQTPFTFGPGTKVDIKSGGGGSEVQLVESGGGLVQPGGSLKLSCAASGFTFNKYAMNWVRQAPGKGLEWVARIRSKYNNYATYYADSVKDRFTISRDDSKNTAYLQMNNLKTEDTAVYYCVRHGNFGNSYISYWAYWGQGTLVTVSSGGGGSGGGGSGGGGSQTVVTQEPSLTVSPGGTVTLTCGSSTGAVTSGNYPNWVQQKPGQAPRGLIGGTKFLAPGTPARFSGSLLGGKAALTLSGVQPEDEAEYYCVLWYSNRWVFGGGTKLTVLGGGGSQRFVTGHFGGLHPANGGGGGSGGGSRDWDFDVFGGGTPVGGHHHHHH

SEQ ID NO: 457 - protein, 571 aa, Artificial Sequence
  Synthetic polypeptide
QRFVTGHFGGLHPANGGGGGSQVQLVQSGAEVKKPGASVKVSCKASGYTFTSYGISWVRQAPGQGLEWMGWINPYTGNRNYAQKFQGRVTMTTDTSTNTAYMELSSLRSEDTAVYYCARGSGGFDYWGQGTLVTVSSGGGGSGGGGSGGGGSDIVMTQSPLSLPVTPGEPASISCRSSQSLLHSVGYNYLDWYLQKPGQSPQLLIYLGSNRASGVPDRFSGSGSGTDFTLKISRVEAEDVGVYYCMQALQTPFTFGPGTKVDIKSGGGGSEVQLVESGGGLVQPGGSLKLSCAASGFTFNKYAMNWVRQAPGKGLEWVARIRSKYNNYATYYADSVKDRFTISRDDSKNTAYLQMNNLKTEDTAVYYCVRHGNFGNSYISYWAYWGQGTLVTVSSGGGGSGGGGSGGGGSQTVVTQEPSLTVSPGGTVTLTCGSSTGAVTSGNYPNWVQQKPGQAPRGLIGGTKFLAPGTPARFSGSLLGGKAALTLSGVQPEDEAEYYCVLWYSNRWVFGGGTKLTVLGGGGSQRFVTGHFGGLHPANGGGGGSGGGSRDWDFDVFGGGTPVGGHHHHHH

SEQ ID NO: 458 - protein, 571 aa, Artificial Sequence
  Synthetic polypeptide
QRFVTGHFGGLHPANGGGGGSQVQLVQSGAEVKKPGASVKVSCKASGYSFTSYGISWVRQAPGQGLEWMGWINPYTGNRNYAQKVQGRVTMTTDTSTSTAYMELRSLRSDDTAVYYCARGSGGFDYWGQGTLVTVSSGGGGSGGGGSGGGGSDIVMTQSPLSLPVTPGEPASISCRSSQSLLHSVGYNYLDWYLQKPGQSPQLLIYLGSNRASGVPDRFSGSGSGTDFTLKISRVEAEDVGVYYCMQALQTPFTFGPGTKVEIKSGGGGSEVQLVESGGGLVQPGGSLKLSCAASGFTFNKYAMNWVRQAPGKGLEWVARIRSKYNNYATYYADSVKDRFTISRDDSKNTAYLQMNNLKTEDTAVYYCVRHGNFGNSYISYWAYWGQGTLVTVSSGGGGSGGGGSGGGGSQTVVTQEPSLTVSPGGTVTLTCGSSTGAVTSGNYPNWVQQKPGQAPRGLIGGTKFLAPGTPARFSGSLLGGKAALTLSGVQPEDEAEYYCVLWYSNRWVFGGGTKLTVLGGGGSQRFVTGHFGGLHPANGGGGGSGGGSRDWDFDVFGGGTPVGGHHHHHH

SEQ ID NO: 459 - protein, 571 aa, Artificial Sequence
  Synthetic polypeptide
QRFVTGHFGGLHPANGGGGGSQVQLVQSGAEVKKPGASVKVSCKASGYTFTYYGISWVRQAPGQGLEWMGWINPYTGKTNYAQKVQGRVTMTTDTSTSTAYMELRNLRSDDTAVYYCARGSGGFDYWGQGTLVTVSSGGGGSGGGGSGGGGSDIVMTQTPLSLSVTPGQPASISCRSSQSLLHSVGYNYLDWYLQKPGQSPQLLIYLGSNRASGVPDRFSGSGSGTDFTLKISRVEAEDVGVYYCMQALQTPFTFGPGTKVDIKSGGGGSEVQLVESGGGLVQPGGSLKLSCAASGFTFNKYAMNWVRQAPGKGLEWVARIRSKYNNYATYYADSVKDRFTISRDDSKNTAYLQMNNLKTEDTAVYYCVRHGNFGNSYISYWAYWGQGTLVTVSSGGGGSGGGGSGGGGSQTVVTQEPSLTVSPGGTVTLTCGSSTGAVTSGNYPNWVQQKPGQAPRGLIGGTKFLAPGTPARFSGSLLGGKAALTLSGVQPEDEAEYYCVLWYSNRWVFGGGTKLTVLGGGGSQRFVTGHFGGLHPANGGGGGSGGGSRDWDFDVFGGGTPVGGHHHHHH

SEQ ID NO: 460 - protein, 571 aa, Artificial Sequence
  Synthetic polypeptide
QRFVTGHFGGLHPANGGGGGSQVQLVQSGAEVKKPGASVKVSCKASGYTFTYYGISWVRQAPGQGLEWMGWINPYTGKTNYAQKLQGRVTMTTDTSTSTAYMELRSLRSDDTAVYYCARGSGGFDYWGQGTLVTVSSGGGGSGGGGSGGGGSDIVMTQTPLSLSVTPGQPASISCRSSQSLLHSVGYNYLDWYLQKPGQSPQLLIYLGSNRASGVPDRFSGSGSGTDFTLKISRVEAEDVGVYYCMQALQTPFTFGPGTKVDIKSGGGGSEVQLVESGGGLVQPGGSLKLSCAASGFTFNKYAMNWVRQAPGKGLEWVARIRSKYNNYATYYADSVKDRFTISRDDSKNTAYLQMNNLKTEDTAVYYCVRHGNFGNSYISYWAYWGQGTLVTVSSGGGGSGGGGSGGGGSQTVVTQEPSLTVSPGGTVTLTCGSSTGAVTSGNYPNWVQQKPGQAPRGLIGGTKFLAPGTPARFSGSLLGGKAALTLSGVQPEDEAEYYCVLWYSNRWVFGGGTKLTVLGGGGSQRFVTGHFGGLHPANGGGGGSGGGSRDWDFDVFGGGTPVGGHHHHHH

SEQ ID NO: 461 - protein, 575 aa, Artificial Sequence
  Synthetic polypeptide
QRFVTGHFGGLHPANGGGGGSQVQLVESGGGVVQPGRSLRLSCAASGFTFRNYAMHWVRQAPGKGLEWVAVISYSGNNKYYASSVKGRFTISRDNSKNTLYLQLNSLRAEDTAVYYCAREFYYDSTGYDYSTPGDYWGQGTLVTVSSGGGGSGGGGSGGGGSDIQMTQSPSSLSASVGDRVTITCQASQDISNYLNWYQQKPGKAPKLLIYDASNLETGVPSRFSGSGSGTDFTFTISSLQPEDIATYYCQQYDNLPTFGQGTRLEIKSGGGGSEVQLVESGGGLVQPGGSLKLSCAASGFTFNKYAMNWVRQAPGKGLEWVARIRSKYNNYATYYADSVKDRFTISRDDSKNTAYLQMNNLKTEDTAVYYCVRHGNFGNSYISYWAYWGQGTLVTVSSGGGGSGGGGSGGGGSQTVVTQEPSLTVSPGGTVTLTCGSSTGAVTSGNYPNWVQQKPGQAPRGLIGGTKFLAPGTPARFSGSLLGGKAALTLSGVQPEDEAEYYCVLWYSNRWVFGGGTKLTVLGGGGSQRFVTGHFGGLHPANGGGGGSGGGSRDWDFDVFGGGTPVGGHHHHHH

SEQ ID NO: 462 - protein, 576 aa, Artificial Sequence
  Synthetic polypeptide
QRFVTGHFGGLHPANGGGGGSQVQLVESGGGVVQPGRSLRLSCVASGFTFRNYAMHWVRQAPGKGLEWVAVISYSGNNKYYASSVKGRFTISRDNSKNTLYLQLNSLRAEDTAVYYCAREFYYDSTGYDYSTPGDYWGQGTLVTVSSGGGGSGGGGSGGGGSDIQMTQSPSSLSASVGDRVTITCRASQSISSYLNWYQQKPGKAPKLLIYDASSLQSGVPSRFSGSGSGTEFTLTISSLQAEDVAVYYCQQYYSTPLTFGGGTKVDIKSGGGGSEVQLVESGGGLVQPGGSLKLSCAASGFTFNKYAMNWVRQAPGKGLEWVARIRSKYNNYATYYADSVKDRFTISRDDSKNTAYLQMNNLKTEDTAVYYCVRHGNFGNSYISYWAYWGQGTLVTVSSGGGGSGGGGSGGGGSQTVVTQEPSLTVSPGGTVTLTCGSSTGAVTSGNYPNWVQQKPGQAPRGLIGGTKFLAPGTPARFSGSLLGGKAALTLSGVQPEDEAEYYCVLWYSNRWVFGGGTKLTVLGGGGSQRFVTGHFGGLHPANGGGGGSGGGSRDWDFDVFGGGTPVGGHHHHHH

SEQ ID NO: 463 - protein, 576 aa, Artificial Sequence
  Synthetic polypeptide
QRFVTGHFGGLHPANGGGGGSQVQLVESGGGVVQPGRSLRLSCAASGFTFRNYAMHWVRQAPGKGLEWVAGISYSGTNKYYASSVKGRFTISRDNSKNTLYLQLNSLRAEDTAVYYCAREFYYDSTGYDYSTPGDYWGQGTLVTVSSGGGGSGGGGSGGGGSDIQMTQSPSSLSASVGDRVTITCQASQDISNYLNWYQQKPGKAPKLLIYDASNLETGVPSRFSGSGSGTEFTLTISSLQPEDIATYYCQQYDNLPLTFGGGTKVDIKSGGGGSEVQLVESGGGLVQPGGSLKLSCAASGFTFNKYAMNWVRQAPGKGLEWVARIRSKYNNYATYYADSVKDRFTISRDDSKNTAYLQMNNLKTEDTAVYYCVRHGNFGNSYISYWAYWGQGTLVTVSSGGGGSGGGGSGGGGSQTVVTQEPSLTVSPGGTVTLTCGSSTGAVTSGNYPNWVQQKPGQAPRGLIGGTKFLAPGTPARFSGSLLGGKAALTLSGVQPEDEAEYYCVLWYSNRWVFGGGTKLTVLGGGGSQRFVTGHFGGLHPANGGGGGSGGGSRDWDFDVFGGGTPVGGHHHHHH

SEQ ID NO: 464 - protein, 576 aa, Artificial Sequence
  Synthetic polypeptide
QRFVTGHFGGLHPANGGGGGSQVQLVESGGGVVQPGRSLRLSCVASGFTFRNYAMHWVRQAPGKGLEWVAVISYSGNNKYYASSVKGRFTISRDNSKNTLFLQLNSLRAEDTAVYYCAREFYYDSTGYDYSTPGNYWGQGTLVTVSSGGGGSGGGGSGGGGSDIQMTQSPSSLSASVGDRVTITCQASQDISNYLNWYQQKPGKAPKLLIYDASNLETGVPSRFSGSGSGTDFTFTISSLQPEDIATYYCQQYVNLPLTFGGGTKLEIKSGGGGSEVQLVESGGGLVQPGGSLKLSCAASGFTFNKYAMNWVRQAPGKGLEWVARIRSKYNNYATYYADSVKDRFTISRDDSKNTAYLQMNNLKTEDTAVYYCVRHGNFGNSYISYWAYWGQGTLVTVSSGGGGSGGGGSGGGGSQTVVTQEPSLTVSPGGTVTLTCGSSTGAVTSGNYPNWVQQKPGQAPRGLIGGTKFLAPGTPARFSGSLLGGKAALTLSGVQPEDEAEYYCVLWYSNRWVFGGGTKLTVLGGGGSQRFVTGHFGGLHPANGGGGGSGGGSRDWDFDVFGGGTPVGGHHHHHH

SEQ ID NO: 465 - protein, 573 aa, Artificial Sequence
  Synthetic polypeptide
QRFVTGHFGGLHPANGGGGGSQVQLVESGGGVVQPGRSLRLSCAASGFTFSSYGMQWVRQAPGKGLEWVAVIWYSGSNKYYASSVKGRFTISRDNSKNTLYLQMNSLRAEDTAVYYCARDGYPIFYRYYGMDVWGQGTTVTVSSGGGGSGGGGSGGGGSDIQMTQSPSSLSASVGDRVTITCRASQGISNYLAWYQQKPGKVPKLLIYAASTLQSGVPSRFSGSGSGTDFTLTISSLQPEDVATYYCQKYNSAPLTFGGGTKVEIKSGGGGSEVQLVESGGGLVQPGGSLKLSCAASGFTFNKYAMNWVRQAPGKGLEWVARIRSKYNNYATYYADSVKDRFTISRDDSKNTAYLQMNNLKTEDTAVYYCVRHGNFGNSYISYWAYWGQGTLVTVSSGGGGSGGGGSGGGGSQTVVTQEPSLTVSPGGTVTLTCGSSTGAVTSGNYPNWVQQKPGQAPRGLIGGTKFLAPGTPARFSGSLLGGKAALTLSGVQPEDEAEYYCVLWYSNRWVFGGGTKLTVLGGGGSQRFVTGHFGGLHPANGGGGGSGGGSRDWDFDVFGGGTPVGGHHHHHH

SEQ ID NO: 466 - protein, 574 aa, Artificial Sequence
  Synthetic polypeptide
QRFVTGHFGGLHPANGGGGGSQVQLVESGGGVVQPGRSLRLSCAASGFTFSSYGMHWVRQAPGKGLEWVAVISYSGSNKYYASSVKGRFTISRDNSKNTLYLQMNSLRAEDTAVYYCARDGYPIFYRYYGMDVWGQGTTVTVSSGGGGSGGGGSGGGGSEIVLTQSPGTLSLSPGERATLSCRASQSVSSSYLAWYQQKPGQAPRLLIYGASSRATGIPDRFSGSGSGTDFTLTISRLEPEDLAVYYCQQYGTSPLTFGGGTKLEIKSGGGGSEVQLVESGGGLVQPGGSLKLSCAASGFTFNKYAMNWVRQAPGKGLEWVARIRSKYNNYATYYADSVKDRFTISRDDSKNTAYLQMNNLKTEDTAVYYCVRHGNFGNSYISYWAYWGQGTLVTVSSGGGGSGGGGSGGGGSQTVVTQEPSLTVSPGGTVTLTCGSSTGAVTSGNYPNWVQQKPGQAPRGLIGGTKFLAPGTPARFSGSLLGGKAALTLSGVQPEDEAEYYCVLWYSNRWVFGGGTKLTVLGGGGSQRFVTGHFGGLHPANGGGGGSGGGSRDWDFDVFGGGTPVGGHHHHHH

SEQ ID NO: 467 - protein, 574 aa, Artificial Sequence
  Synthetic polypeptide
QRFVTGHFGGLHPANGGGGGSQVQLVESGGGVVQPGRSLRLSCAASGFTFSSFGMHWVRQAPGKGLEWVAFIWYSGSNKYYASSVKGRVTISRDNSKNTLYLQMNSLRAEDTAVYYCARDGYPIFYYYYGMDVWGQGTTVTVSSGGGGSGGGGSGGGGSEIVLTQSPGTLSLSPGERATLSCRASQSVSSSYLAWYQQKPGQAPRLLIYGASSRATGIPDRFSGSGSGTDFTLTISRLEPEDFAVYYCQQYGSSPFTFGPGTRLEIKSGGGGSEVQLVESGGGLVQPGGSLKLSCAASGFTFNKYAMNWVRQAPGKGLEWVARIRSKYNNYATYYADSVKDRFTISRDDSKNTAYLQMNNLKTEDTAVYYCVRHGNFGNSYISYWAYWGQGTLVTVSSGGGGSGGGGSGGGGSQTVVTQEPSLTVSPGGTVTLTCGSSTGAVTSGNYPNWVQQKPGQAPRGLIGGTKFLAPGTPARFSGSLLGGKAALTLSGVQPEDEAEYYCVLWYSNRWVFGGGTKLTVLGGGGSQRFVTGHFGGLHPANGGGGGSGGGSRDWDFDVFGGGTPVGGHHHHHH

SEQ ID NO: 468 - protein, 574 aa, Artificial Sequence
  Synthetic polypeptide
QRFVTGHFGGLYPANGGGGGSQVQLVESGGGVVQPGGSLRLSCAASGFTFSSYGMHWVRQAPGKGLEWVAFIWYDGSNKYYADSVKGRFTISRDNSKNTLYLQMNSLRAEDTAVYYCARRAGIIGTIGYYYGMDVWGQGTTVTVSSGGGGSGGGGSGGGGSSYELTQPPSVSVSPGQTASITCSGDRLGEKYTSWYQQRPGQSPLLVIYQDTKRPSGIPERFSGSNSGNTATLTISGTQAMDEADYYCQAWESSTVVFGGGTKLTVLSGGGGSEVQLVESGGGLVQPGGSLKLSCAASGFTFNKYAMNWVRQAPGKGLEWVARIRSKYNNYATYYADSVKDRFTISRDDSKNTAYLQMNNLKTEDTAVYYCVRHGNFGNSYISYWAYWGQGTLVTVSSGGGGSGGGGSGGGGSQTVVTQEPSLTVSPGGTVTLTCGSSTGAVTSGNYPNWVQQKPGQAPRGLIGGTKFLAPGTPARFSGSLLGGKAALTLSGVQPEDEAEYYCVLWYSNRWVFGGGTKLTVLGGGGSQRFVTGHFGGLHPANGGGGGSGGGSRDWDFDVFGGGTPVGGHHHHHH

SEQ ID NO: 469 - protein, 571 aa, Artificial Sequence
  Synthetic polypeptide
QRFVTGHFGGLYPANGGGGGSQVQLQESGPGLVKPSQTLSLTCTVSGGSISRGGYYWSWIRQHPGKGLEWIGYIFYRGRTYYNPSLKSRVTISVDTSKNQFSLKLSSVTAADTAVYYCARVNSNYGWFDPWGQGTLVTVSSGGGGSGGGGSGGGGSEIVLTQFPGTLSLSPGERATLSCRASQSVSSSYLAWYQQKPGQAPRLLIYGASSRATGIPDRFSGSGSGTDFTLTISRLEPEDFAVYYCQQYGSSPLTFGGGTKLEIKSGGGGSEVQLVESGGGLVQPGGSLKLSCAASGFTFNKYAMNWVRQAPGKGLEWVARIRSKYNNYATYYADSVKDRFTISRDDSKNTAYLQMNNLKTEDTAVYYCVRHGNFGNSYISYWAYWGQGTLVTVSSGGGGSGGGGSGGGGSQTVVTQEPSLTVSPGGTVTLTCGSSTGAVTSGNYPNWVQQKPGQAPRGLIGGTKFLAPGTPARFSGSLLGGKAALTLSGVQPEDEAEYYCVLWYSNRWVFGGGTKLTVLGGGGSQRFVTGHFGGLHPANGGGGGSGGGSRDWDFDVFGGGTPVGGHHHHHH

SEQ ID NO: 470 - protein, 571 aa, Artificial Sequence
  Synthetic polypeptide
QRFVTGHFGGLYPANGGGGGSQVQLQESGPGLVKPSQTLSLTCTVSGGSISSGGYYWSWIRQHPGKGLEWIGYIFYRGRTYYNPSLKSRVTISVDTSKNQFSLKLSSVTAADTAVYYCARVYSNYGWFDPWGQGTLVTVSSGGGGSGGGGSGGGGSEIVLTQSPGTLSLSPGERATLSCRASQSVSSSYLAWYQQKPGQAPRLLIYGTSNRATGIPDRFSGSGSGTDFTLTISRLEPEDFAVYYCQQYGSSPLTFGGGTKLEIKSGGGGSEVQLVESGGGLVQPGGSLKLSCAASGFTFNKYAMNWVRQAPGKGLEWVARIRSKYNNYATYYADSVKDRFTISRDDSKNTAYLQMNNLKTEDTAVYYCVRHGNFGNSYISYWAYWGQGTLVTVSSGGGGSGGGGSGGGGSQTVVTQEPSLTVSPGGTVTLTCGSSTGAVTSGNYPNWVQQKPGQAPRGLIGGTKFLAPGTPARFSGSLLGGKAALTLSGVQPEDEAEYYCVLWYSNRWVFGGGTKLTVLGGGGSQRFVTGHFGGLHPANGGGGGSGGGSRDWDFDVFGGGTPVGGHHHHHH

SEQ ID NO: 471 - protein, 571 aa, Artificial Sequence
  Synthetic polypeptide
QRFVTGHFGGLYPANGGGGGSQVQLQESGPGLVKPSQTLSLTCTVSGGSISSGGYYWSWIRQHPGKGLEWIGYIFYSGRTYYNPSLKSRVTISVDTSKNQFSLKLSSVTAADTAVYYCARVYSNYGWFDPWGQGTLVTVSSGGGGSGGGGSGGGGSEIVLTQSPGTLSLSPGERATLSCRASQSVSSSYLAWYQQKPGQAPRLLIYGASSRATGIPDRFSGSGSGTDFTLTISRLEPEDFAVYYCQQYGSSPLTFGGGTKLEIKSGGGGSEVQLVESGGGLVQPGGSLKLSCAASGFTFNKYAMNWVRQAPGKGLEWVARIRSKYNNYATYYADSVKDRFTISRDDSKNTAYLQMNNLKTEDTAVYYCVRHGNFGNSYISYWAYWGQGTLVTVSSGGGGSGGGGSGGGGSQTVVTQEPSLTVSPGGTVTLTCGSSTGAVTSGNYPNWVQQKPGQAPRGLIGGTKFLAPGTPARFSGSLLGGKAALTLSGVQPEDEAEYYCVLWYSNRWVFGGGTKLTVLGGGGSQRFVTGHFGGLHPANGGGGGSGGGSRDWDFDVFGGGTPVGGHHHHHH

SEQ ID NO: 472 - protein, 571 aa, Artificial Sequence
  Synthetic polypeptide
QRFVTGHFGGLYPANGGGGGSQVQLQESGPGLVKPSQTLSLTCTVSGGSISSGGYYWSWIRQHPGKGLEWIGYIFYSGRTYYNPSLKSRVTISVDTSKNQFSLKLRSVTAADTAVYYCARVYSNYGWFDPWGQGTLVTVSSGGGGSGGGGSGGGGSEIVLTQSPGTLSLSPGERATLSCRASQSVSSSYLAWYQQKPGQAPRLLIYGASSRATGIPDRFSGSGSGTDFTLTISRLEPEDFAVYYCQQYGSSPLTFGGGTKLEIKSGGGGSEVQLVESGGGLVQPGGSLKLSCAASGFTFNKYAMNWVRQAPGKGLEWVARIRSKYNNYATYYADSVKDRFTISRDDSKNTAYLQMNNLKTEDTAVYYCVRHGNFGNSYISYWAYWGQGTLVTVSSGGGGSGGGGSGGGGSQTVVTQEPSLTVSPGGTVTLTCGSSTGAVTSGNYPNWVQQKPGQAPRGLIGGTKFLAPGTPARFSGSLLGGKAALTLSGVQPEDEAEYYCVLWYSNRWVFGGGTKLTVLGGGGSQRFVTGHFGGLHPANGGGGGSGGGSRDWDFDVFGGGTPVGGHHHHHH

SEQ ID NO: 473 - protein, 571 aa, Artificial Sequence
  Synthetic polypeptide
QRFVTGHFGGLYPANGGGGGSQVQLQESGPGLVKPSQTLSLTCTVSGGSISSGGYYWSWIRQHPGKGLEWIGYIYYSGSTFYNPSLRSRVTISVDTSKNQFSLKLSSVTAADTAVYYCARDSSSSRALDYWGQGTLVTVSSGGGGSGGGGSGGGGSEIVLTQSPGTLSLSPGERATLSCRASQSVSSSYLAWYQQKPGQAPRLLIYGASSRATGIPDRFSGSGSGTDFTLTISRLEPEDFAVYYCQQYDSSPRTFGQGTKLEIKSGGGGSEVQLVESGGGLVQPGGSLKLSCAASGFTFNKYAMNWVRQAPGKGLEWVARIRSKYNNYATYYADSVKDRFTISRDDSKNTAYLQMNNLKTEDTAVYYCVRHGNFGNSYISYWAYWGQGTLVTVSSGGGGSGGGGSGGGGSQTVVTQEPSLTVSPGGTVTLTCGSSTGAVTSGNYPNWVQQKPGQAPRGLIGGTKFLAPGTPARFSGSLLGGKAALTLSGVQPEDEAEYYCVLWYSNRWVFGGGTKLTVLGGGGSQRFVTGHFGGLHPANGGGGGSGGGSRDWDFDVFGGGTPVGGHHHHHH

SEQ ID NO: 474 - protein, 571 aa, Artificial Sequence
  Synthetic polypeptide
QRFVTGHFGGLYPANGGGGGSQVQLQESGPGLVKPSQTLSLTCTVSGGSISSGGYYWSWIRQHPGKGLEWIGYIYYRGRTYYNPSLKSRVTISVDTSKNQFSLKLSSVTAADTAVYYCARVYSNYGWFDPWGQGTLVTVSSGGGGSGGGGSGGGGSEIVLTQSPGTLSLSPGERATLSCRASQSVSSSYLAWYQQKPGQAPRLLIYGASSRATGIPDRFSGSGSGTDFTLTISRLEPEDFAVYYCQQYGSSPLTFGGGTKLEIKSGGGGSEVQLVESGGGLVQPGGSLKLSCAASGFTFNKYAMNWVRQAPGKGLEWVARIRSKYNNYATYYADSVKDRFTISRDDSKNTAYLQMNNLKTEDTAVYYCVRHGNFGNSYISYWAYWGQGTLVTVSSGGGGSGGGGSGGGGSQTVVTQEPSLTVSPGGTVTLTCGSSTGAVTSGNYPNWVQQKPGQAPRGLIGGTKFLAPGTPARFSGSLLGGKAALTLSGVQPEDEAEYYCVLWYSNRWVFGGGTKLTVLGGGGSQRFVTGHFGGLHPANGGGGGSGGGSRDWDFDVFGGGTPVGGHHHHHH

SEQ ID NO: 475 - protein, 570 aa, Artificial Sequence
  Synthetic polypeptide
QRFVTGHFGGLYPANGGGGGSQVQLQESGPGLVKPSETLSLTCTVSGGSISSGGYYWSWIRQHPGKGLEWIGYIFYRGRTYYNPSLKSRVTISVDTSKNQFSLKLSSVTAADTAVYYCARVYSNYGWFDPWGQGTLVTVSSGGGGSGGGGSGGGGSEIVLTQSPGTLSLSPGERATLSCRASQSVSSSYLAWYQQKPGQAPRLLIYGASSRATGIPDRFSGSGSGTDFTLTISRLEPEDFAVYYCQQYGSSPTFGGGTKVEIKSGGGGSEVQLVESGGGLVQPGGSLKLSCAASGFTFNKYAMNWVRQAPGKGLEWVARIRSKYNNYATYYADSVKDRFTISRDDSKNTAYLQMNNLKTEDTAVYYCVRHGNFGNSYISYWAYWGQGTLVTVSSGGGGSGGGGSGGGGSQTVVTQEPSLTVSPGGTVTLTCGSSTGAVTSGNYPNWVQQKPGQAPRGLIGGTKFLAPGTPARFSGSLLGGKAALTLSGVQPEDEAEYYCVLWYSNRWVFGGGTKLTVLGGGGSQRFVTGHFGGLHPANGGGGGSGGGSRDWDFDVFGGGTPVGGHHHHHH

SEQ ID NO: 476 - protein, 571 aa, Artificial Sequence
  Synthetic polypeptide
QRFVTGHFGGLYPANGGGGGSQVQLQESGPGLVKPSQTLSLTCTVSGGSISSGGYYWSWIRQHPGKGLEWIGYIFYRGRTYYNPSLKSRVTISVDTSKNQFSLKLSSVTAADTAVYYCARVYSNYGWFDPWGQGTLVTVSSGGGGSGGGGSGGGGSEIVLTQSPGTLSLSPGERATLSCRASQSVSSSYLAWYQQKPGQAPRLLIYGASSRATGIPDRFSGSGSGTDFTLTISRLEPEDFAVYYCQQYGSSPLTFGGGTKVEIKSGGGGSEVQLVESGGGLVQPGGSLKLSCAASGFTFNKYAMNWVRQAPGKGLEWVARIRSKYNNYATYYADSVKDRFTISRDDSKNTAYLQMNNLKTEDTAVYYCVRHGNFGNSYISYWAYWGQGTLVTVSSGGGGSGGGGSGGGGSQTVVTQEPSLTVSPGGTVTLTCGSSTGAVTSGNYPNWVQQKPGQAPRGLIGGTKFLAPGTPARFSGSLLGGKAALTLSGVQPEDEAEYYCVLWYSNRWVFGGGTKLTVLGGGGSQRFVTGHFGGLHPANGGGGGSGGGSRDWDFDVFGGGTPVGGHHHHHH

SEQ ID NO: 477 - protein, 570 aa, Artificial Sequence
  Synthetic polypeptide
QRFVTGHFGGLYPANGGGGGSQVQLQESGPGLVKPSQTLSLTCTVSGGSISSGGYYWSWIRQHPGKGLEWIGYIYYRGRTYYNPSLKSRVTISVDTSKNQFSLKLSSVTAADTAVYYCARVYSNYGWFDPWGQGTLVTVSSGGGGSGGGGSGGGGSEIVLTQSPGTLSLSPGERATLSCRASQSVSSSYLAWYQQKPGQAPRLLIYGASSRATGIPDRFSGSGSGTDFTLTISRLEPEDFAVYYCQQYGSSPTFGPGTKVEIKSGGGGSEVQLVESGGGLVQPGGSLKLSCAASGFTFNKYAMNWVRQAPGKGLEWVARIRSKYNNYATYYADSVKDRFTISRDDSKNTAYLQMNNLKTEDTAVYYCVRHGNFGNSYISYWAYWGQGTLVTVSSGGGGSGGGGSGGGGSQTVVTQEPSLTVSPGGTVTLTCGSSTGAVTSGNYPNWVQQKPGQAPRGLIGGTKFLAPGTPARFSGSLLGGKAALTLSGVQPEDEAEYYCVLWYSNRWVFGGGTKLTVLGGGGSQRFVTGHFGGLHPANGGGGGSGGGSRDWDFDVFGGGTPVGGHHHHHH

SEQ ID NO: 478 - protein, 570 aa, Artificial Sequence
  Synthetic polypeptide
QRFVTGHFGGLYPANGGGGGSQVQLQESGPGLVKPSQTLSLTCTVSGGSISSGGYYWSWIRQHPGKGLEWIGYIYYRGRTYYNPSLKSRVTISVDTSKNQFSLKLSSVTAADTAVYYCARVYSNYGWFDPWGQGTLVTVSSGGGGSGGGGSGGGGSEIVLTQSPGTLSLSPGERATLSCRASQSVSSSYLAWYQQKPGQAPRLLIYGASSRATGIPDRFSGSGSGTDFTLTISRLEPEDFAVYYCQQYGSSPTFGGGTKVEIKSGGGGSEVQLVESGGGLVQPGGSLKLSCAASGFTFNKYAMNWVRQAPGKGLEWVARIRSKYNNYATYYADSVKDRFTISRDDSKNTAYLQMNNLKTEDTAVYYCVRHGNFGNSYISYWAYWGQGTLVTVSSGGGGSGGGGSGGGGSQTVVTQEPSLTVSPGGTVTLTCGSSTGAVTSGNYPNWVQQKPGQAPRGLIGGTKFLAPGTPARFSGSLLGGKAALTLSGVQPEDEAEYYCVLWYSNRWVFGGGTKLTVLGGGGSQRFVTGHFGGLHPANGGGGGSGGGSRDWDFDVFGGGTPVGGHHHHHH

SEQ ID NO: 479 - protein, 570 aa, Artificial Sequence
  Synthetic polypeptide
QRFVTGHFGGLYPANGGGGGSQVQLQESGPGLVKPSQTLSLTCTISGGSISSGGYYWSWIRQHPGKGLEWIGYIFYSGRTYYNPSLKSRVTISVDTSKNQFSLKLTSVTAADTAVYYCARVNSNYGWFDPWGQGTLVTVSSGGGGSGGGGSGGGGSEIVLTQSPGTLSLSPGERATLSCRASQSVSSSYLAWYQQKPGQAPRLLIYGASSRATGIPDRFSGSGSGTDFTLTISRLEPEDFAVYYCQQYGSSPTFGGGTKVEIKSGGGGSEVQLVESGGGLVQPGGSLKLSCAASGFTFNKYAMNWVRQAPGKGLEWVARIRSKYNNYATYYADSVKDRFTISRDDSKNTAYLQMNNLKTEDTAVYYCVRHGNFGNSYISYWAYWGQGTLVTVSSGGGGSGGGGSGGGGSQTVVTQEPSLTVSPGGTVTLTCGSSTGAVTSGNYPNWVQQKPGQAPRGLIGGTKFLAPGTPARFSGSLLGGKAALTLSGVQPEDEAEYYCVLWYSNRWVFGGGTKLTVLGGGGSQRFVTGHFGGLHPANGGGGGSGGGSRDWDFDVFGGGTPVGGHHHHHH

SEQ ID NO: 480 - protein, 571 aa, Artificial Sequence
  Synthetic polypeptide
QRFVTGHFGGLYPANGGGGGSQVQLQESGPGLVKPSQTLSLTCTVSGGSISSGGYYWSWIRQHPGKGLDWIGYIFYRGRTYYNPSLKSRVTISVDTSKNQFSLKLSSVTAADTAVYYCARVNSNYGWFDPWGQGTLVTVSSGGGGSGGGGSGGGGSEIVLTQSPGTLSLSPGERATLSCRASQSVSSSYLAWYQQKPGQAPRLLIYGASSRATGIPDRFSGSGSGTDFTLTISRLEPEDFAVYYCQQYGSSPLTFGGGTKVEIKSGGGGSEVQLVESGGGLVQPGGSLKLSCAASGFTFNKYAMNWVRQAPGKGLEWVARIRSKYNNYATYYADSVKDRFTISRDDSKNTAYLQMNNLKTEDTAVYYCVRHGNFGNSYISYWAYWGQGTLVTVSSGGGGSGGGGSGGGGSQTVVTQEPSLTVSPGGTVTLTCGSSTGAVTSGNYPNWVQQKPGQAPRGLIGGTKFLAPGTPARFSGSLLGGKAALTLSGVQPEDEAEYYCVLWYSNRWVFGGGTKLTVLGGGGSQRFVTGHFGGLHPANGGGGGSGGGSRDWDFDVFGGGTPVGGHHHHHH

SEQ ID NO: 481 - protein, 570 aa, Artificial Sequence
  Synthetic polypeptide
QRFVTGHFGGLYPANGGGGGSQVQLQESGPGLVKPSQTLSLTCTVSGGSISSGGYYWSWIRQHPGKGLEWIGYIYYRGRTYYNPSLKSRVTISVDTSKNQFSLKLSSVTAADTAVYYCARVYSNYGWFDPWGQGTLVTVSSGGGGSGGGGSGGGGSEIVLTQSPGTLSLSPGERATLSCRASQSVSSSYLAWYQQKPGQAPRLLIYGASTRATGIPDRFSGSGSGTDFTLTISRLEPEDFAVYYCQQYGSSPSFGQGTKVEIKSGGGGSEVQLVESGGGLVQPGGSLKLSCAASGFTFNKYAMNWVRQAPGKGLEWVARIRSKYNNYATYYADSVKDRFTISRDDSKNTAYLQMNNLKTEDTAVYYCVRHGNFGNSYISYWAYWGQGTLVTVSSGGGGSGGGGSGGGGSQTVVTQEPSLTVSPGGTVTLTCGSSTGAVTSGNYPNWVQQKPGQAPRGLIGGTKFLAPGTPARFSGSLLGGKAALTLSGVQPEDEAEYYCVLWYSNRWVFGGGTKLTVLGGGGSQRFVTGHFGGLHPANGGGGGSGGGSRDWDFDVFGGGTPVGGHHHHHH

SEQ ID NO: 482 - protein, 571 aa, Artificial Sequence
  Synthetic polypeptide
QRFVTGHFGGLYPANGGGGGSQVQLQESGPGLVRPSQTLSLTCTVSGGSISSGGYYWSWIRQHPGKGLEWIGYIYYRGRTYYNPSLKSRVTISVDTSKNQFSLKLSSVTAADTAVYYCARVYSNYGWFDPWGQGTLVTVSSGGGGSGGGGSGGGGSEIVLTQSPGTLSLSPGERATLSCRASQSVSSSYLAWYQQKPGQAPRLLIYGASSRATGIPDRFSGSGSGTDFTLTISRLEPEDFAVYYCQQYDTSPLTFGGGTKVEIKSGGGGSEVQLVESGGGLVQPGGSLKLSCAASGFTFNKYAMNWVRQAPGKGLEWVARIRSKYNNYATYYADSVKDRFTISRDDSKNTAYLQMNNLKTEDTAVYYCVRHGNFGNSYISYWAYWGQGTLVTVSSGGGGSGGGGSGGGGSQTVVTQEPSLTVSPGGTVTLTCGSSTGAVTSGNYPNWVQQKPGQAPRGLIGGTKFLAPGTPARFSGSLLGGKAALTLSGVQPEDEAEYYCVLWYSNRWVFGGGTKLTVLGGGGSQRFVTGHFGGLHPANGGGGGSGGGSRDWDFDVFGGGTPVGGHHHHHH

SEQ ID NO: 483 - protein, 570 aa, Artificial Sequence; identical to SEQ ID NO: 478
  Synthetic polypeptide

SEQ ID NO: 484 - protein, 571 aa, Artificial Sequence
  Synthetic polypeptide
QRFVTGHFGGLYPANGGGGGSQVQLQESGPGLVKPSQTLSLTCTVSGGSISSGGYYWSWIRQHPGKGLEWIGYIYYRGRTYYNPSLKSRVTISVDTSKNQFSLKLSSVTAADTAVYYCARVYSNYGWFDPWGQGTLVTVSSGGGGSGGGGSGGGGSEIVLTQSPGTLSLSPGERATLSCRASQSVSSSYLAWYQQKPGQAPRLLIYGASSRATGIPDRFSGSGSGTDFTLTISRLEPEDFAVYYCQQYGSSPLTFGGGTKVEIKSGGGGSEVQLVESGGGLVQPGGSLKLSCAASGFTFNKYAMNWVRQAPGKGLEWVARIRSKYNNYATYYADSVKDRFTISRDDSKNTAYLQMNNLKTEDTAVYYCVRHGNFGNSYISYWAYWGQGTLVTVSSGGGGSGGGGSGGGGSQTVVTQEPSLTVSPGGTVTLTCGSSTGAVTSGNYPNWVQQKPGQAPRGLIGGTKFLAPGTPARFSGSLLGGKAALTLSGVQPEDEAEYYCVLWYSNRWVFGGGTKLTVLGGGGSQRFVTGHFGGLHPANGGGGGSGGGSRDWDFDVFGGGTPVGGHHHHHH

SEQ ID NO: 485 - protein, 571 aa, Artificial Sequence
  Synthetic polypeptide
QRFVTGHFGGLYPANGGGGGSQVQLQESGPGLVKPSQTLSLTCTVSGGSISSGGYYWSWVRQHPGKGLEWIGYIFYSGRTYYNPSLKSRVIISVDTSKNQFSLKLSSVTAADTAVYYCARVYSNYGWFDPWGQGTLVTVSSGGGGSGGGGSGGGGSEIVLTQSPGTLSLSPGERATLSCRASQSVSSSYLAWYQQKPGQAPRLLIYGASSRATGIPDRFSGSGSGTDFTLTISRLEPEDFAVYYCQQYGSSPLTFGGGTKVEIKSGGGGSEVQLVESGGGLVQPGGSLKLSCAASGFTFNKYAMNWVRQAPGKGLEWVARIRSKYNNYATYYADSVKDRFTISRDDSKNTAYLQMNNLKTEDTAVYYCVRHGNFGNSYISYWAYWGQGTLVTVSSGGGGSGGGGSGGGGSQTVVTQEPSLTVSPGGTVTLTCGSSTGAVTSGNYPNWVQQKPGQAPRGLIGGTKFLAPGTPARFSGSLLGGKAALTLSGVQPEDEAEYYCVLWYSNRWVFGGGTKLTVLGGGGSQRFVTGHFGGLHPANGGGGGSGGGSRDWDFDVFGGGTPVGGHHHHHH

SEQ ID NO: 486 - protein, 571 aa, Artificial Sequence
  Synthetic polypeptide
QRFVTGHFGGLYPANGGGGGSQVQLQESGPGLVKPSQTLSLTCTVSGGSISSGGYYWSWIRQHPGKGLEWIGYIFYSGRTYYNPSLKSRVTISVDTSKNQFSLKLSSVTAADTAVYYCARVYSNYGWFDPWGQGTLVTVSSGGGGSGGGGSGGGGSEIVLTQSPGTLSLSPGERATLSCRASQSVSSSYLAWYQQKPGQAPRLLIYGASSRATGIPDRFSGSGSGTDFTLTISRLEPEDFAVYYCQQYGSSPLTFGGGTKVEIKSGGGGSEVQLVESGGGLVQPGGSLKLSCAASGFTFNKYAMNWVRQAPGKGLEWVARIRSKYNNYATYYADSVKDRFTISRDDSKNTAYLQMNNLKTEDTAVYYCVRHGNFGNSYISYWAYWGQGTLVTVSSGGGGSGGGGSGGGGSQTVVTQEPSLTVSPGGTVTLTCGSSTGAVTSGNYPNWVQQKPGQAPRGLIGGTKFLAPGTPARFSGSLLGGKAALTLSGVQPEDEAEYYCVLWYSNRWVFGGGTKLTVLGGGGSQRFVTGHFGGLHPANGGGGGSGGGSRDWDFDVFGGGTPVGGHHHHHH

SEQ ID NO: 487 - protein, 571 aa, Artificial Sequence
  Synthetic polypeptide
QRFVTGHFGGLYPANGGGGGSQVQLQESGPGLVKPSQTLSLTCTVSGGSISSGGYYWSWIRQHPGKGLEWIGYIFYSGRTYYNPSLKSRVSISVDTSKNQFSLKLSSVTAADTAVYYCARVYSNYGWFDPWGQGTLVTVSSGGGGSGGGGSGGGGSEIVLTQSPGTLSLSPGERATLSCRASQSVSSSYLAWYQQKPGQAPRLLIYGASSRATGIPDRFSGSGSGTDFTLTISRLEPEDFAVYYCQQYGSSPLTFGGGTKVEIKSGGGGSEVQLVESGGGLVQPGGSLKLSCAASGFTFNKYAMNWVRQAPGKGLEWVARIRSKYNNYATYYADSVKDRFTISRDDSKNTAYLQMNNLKTEDTAVYYCVRHGNFGNSYISYWAYWGQGTLVTVSSGGGGSGGGGSGGGGSQTVVTQEPSLTVSPGGTVTLTCGSSTGAVTSGNYPNWVQQKPGQAPRGLIGGTKFLAPGTPARFSGSLLGGKAALTLSGVQPEDEAEYYCVLWYSNRWVFGGGTKLTVLGGGGSQRFVTGHFGGLHPANGGGGGSGGGSRDWDFDVFGGGTPVGGHHHHHH

SEQ ID NO: 488 - protein, 571 aa, Artificial Sequence
  Synthetic polypeptide
QRFVTGHFGGLYPANGGGGGSQVQLQESGPGLVKPSETLSLTCTVSGGSVSSGGYYWSWIRQPPGKGLEWIGYIYYRGRTYYNPSLKSRVTISVDTSKNQFSLKLSSVTAADTAVYYCARVYSNYGWFDPWGQGTLVTVSSGGGGSGGGGSGGGGSEIVLTQSPGTLSLSPGERATLSCRASQSVSSSYLAWYQQKPGQAPRLLIYGASSRATGIPDRFSGSGSGTDFTLTISRLEPEDFAVYYCQQYGSSPLTFGGGTKVEIKSGGGGSEVQLVESGGGLVQPGGSLKLSCAASGFTFNKYAMNWVRQAPGKGLEWVARIRSKYNNYATYYADSVKDRFTISRDDSKNTAYLQMNNLKTEDTAVYYCVRHGNFGNSYISYWAYWGQGTLVTVSSGGGGSGGGGSGGGGSQTVVTQEPSLTVSPGGTVTLTCGSSTGAVTSGNYPNWVQQKPGQAPRGLIGGTKFLAPGTPARFSGSLLGGKAALTLSGVQPEDEAEYYCVLWYSNRWVFGGGTKLTVLGGGGSQRFVTGHFGGLHPANGGGGGSGGGSRDWDFDVFGGGTPVGGHHHHHH

SEQ ID NO: 489 - protein, 570 aa, Artificial Sequence
  Synthetic polypeptide
QRFVTGHFGGLYPANGGGGGSQVQLQESGPGLVKPSQTLSLTCTVSGGSISSGGYYWSWIRQHPGKGLEWIGYIYYRGRTYYNPSLKSRVTISVDTSKNQFSLKLSSVTAADTAVYYCARVYSNYGWFDPWGQGTLVTVSSGGGGSGGGGSGGGGSEIVLTQSPGTLSLSPGERATLSCRASQSVSSSYLAWYQQKPGQAPRLLIYGASSRATGIPDRFSGSGSGTDFTLTISRLEPEDFAVYYCQQYGSSPTFGQGTRLEIKSGGGGSEVQLVESGGGLVQPGGSLKLSCAASGFTFNKYAMNWVRQAPGKGLEWVARIRSKYNNYATYYADSVKDRFTISRDDSKNTAYLQMNNLKTEDTAVYYCVRHGNFGNSYISYWAYWGQGTLVTVSSGGGGSGGGGSGGGGSQTVVTQEPSLTVSPGGTVTLTCGSSTGAVTSGNYPNWVQQKPGQAPRGLIGGTKFLAPGTPARFSGSLLGGKAALTLSGVQPEDEAEYYCVLWYSNRWVFGGGTKLTVLGGGGSQRFVTGHFGGLHPANGGGGGSGGGSRDWDFDVFGGGTPVGGHHHHHH

SEQ ID NO: 490 - protein, 571 aa, Artificial Sequence
  Synthetic polypeptide
QRFVTGHFGGLYPANGGGGGSQVQLQESGPGLVKPSQTLSLTCTVSGGSISSGGYYWSWIRQHPGKGLEWIGYIFYSGKTYYNPSLKSRVSISVDTSKNQFSLKLSSVTAADTAVYYCARVYSNYGWFDPWGQGTLVTVSSGGGGSGGGGSGGGGSEIVLTQSPGTLSLSPGERATLSCRASQSVSSSYLAWYQQKPGQAPRLLIYGASSRATGIPDRFSGSGSGTDFTLTISRLEPEDFAVYYCQQYGSSPITFGQGTRLEIKSGGGGSEVQLVESGGGLVQPGGSLKLSCAASGFTFNKYAMNWVRQAPGKGLEWVARIRSKYNNYATYYADSVKDRFTISRDDSKNTAYLQMNNLKTEDTAVYYCVRHGNFGNSYISYWAYWGQGTLVTVSSGGGGSGGGGSGGGGSQTVVTQEPSLTVSPGGTVTLTCGSSTGAVTSGNYPNWVQQKPGQAPRGLIGGTKFLAPGTPARFSGSLLGGKAALTLSGVQPEDEAEYYCVLWYSNRWVFGGGTKLTVLGGGGSQRFVTGHFGGLHPANGGGGGSGGGSRDWDFDVFGGGTPVGGHHHHHH

SEQ ID NO: 491 - protein, 576 aa, Artificial Sequence
  Synthetic polypeptide
QRFVTGHFGGLYPANGGGGGSQVQLQESGPGLVKPSETLSLTCTVSGGSISSYYWSWIRQPPGKGLEWIGYIYYSGSTNYNPSLKSRVTMSIDTSKNQFSLKLISVTAADTAVYYCARDQRRIVAAGGYYYGMDVWGQGTTVTVSSGGGGSGGGGSGGGGSEIVLTQSPGTLSLSPGERATLSCRASQSVSSSYLAWYQQKPGQAPRLLIYGASTRATGIPARFSGSGSGTDFTLTISRLEPEDFAVYYCQQYGSSPFTFGPGTKVDIKSGGGGSEVQLVESGGGLVQPGGSLKLSCAASGFTFNKYAMNWVRQAPGKGLEWVARIRSKYNNYATYYADSVKDRFTISRDDSKNTAYLQMNNLKTEDTAVYYCVRHGNFGNSYISYWAYWGQGTLVTVSSGGGGSGGGGSGGGGSQTVVTQEPSLTVSPGGTVTLTCGSSTGAVTSGNYPNWVQQKPGQAPRGLIGGTKFLAPGTPARFSGSLLGGKAALTLSGVQPEDEAEYYCVLWYSNRWVFGGGTKLTVLGGGGSQRFVTGHFGGLHPANGGGGGSGGGSRDWDFDVFGGGTPVGGHHHHHH

SEQ ID NO: 492 - protein, 570 aa, Artificial Sequence
  Synthetic polypeptide
QRFVTGHFGGLYPANGGGGGSQVQLQESGPGLVKPSQTLSLTCTVSGGSISSNDYYWSWIRQHPGKGLEWIGYIYYSGSTFYNPSLKSRGAISVDTSKNQFSLKLTSVTAADTAVYYCARGVYRTGAFDIWGQGTMVTVSSGGGGSGGGGSGGGGSDIQMTQSPSSLSASVGDRVTITCRASQSISSYLNWYQQKPGKAPKSLIYAASSLQSGVPSKFSGSGSGTDFTLTISSLQPEDIATYYCQQSYSTPQAFGGGTKVDIKSGGGGSEVQLVESGGGLVQPGGSLKLSCAASGFTFNKYAMNWVRQAPGKGLEWVARIRSKYNNYATYYADSVKDRFTISRDDSKNTAYLQMNNLKTEDTAVYYCVRHGNFGNSYISYWAYWGQGTLVTVSSGGGGSGGGGSGGGGSQTVVTQEPSLTVSPGGTVTLTCGSSTGAVTSGNYPNWVQQKPGQAPRGLIGGTKFLAPGTPARFSGSLLGGKAALTLSGVQPEDEAEYYCVLWYSNRWVFGGGTKLTVLGGGGSQRFVTGHFGGLHPANGGGGGSGGGSRDWDFDVFGGGTPVGGHHHHHH

SEQ ID NO: 493 - protein, 571 aa, Artificial Sequence
  Synthetic polypeptide
QRFVTGHFGGLYPANGGGGGSQVQLVQSGAEVKKPGASVKVSCKASGYTFTYYGISWVRQAPGQGLEWMGWINPYGGETNYAQKLQGRVTMTTDTSTSTAYMELRSLRSDDTAVYYCARGSGGFDYWGQGTLVTVSSGGGGSGGGGSGGGGSDIVMTQTPLSLSVTPGEPASISCRSSQSLLHSNGYNYLDWYLQKPGQSPQLLIYLGSYRASGVPDRFSGSGSGTDFTLKISRVEAEDVGVYYCMQALQTPFTFGPGTKVDIKSGGGGSEVQLVESGGGLVQPGGSLKLSCAASGFTFNKYAMNWVRQAPGKGLEWVARIRSKYNNYATYYADSVKDRFTISRDDSKNTAYLQMNNLKTEDTAVYYCVRHGNFGNSYISYWAYWGQGTLVTVSSGGGGSGGGGSGGGGSQTVVTQEPSLTVSPGGTVTLTCGSSTGAVTSGNYPNWVQQKPGQAPRGLIGGTKFLAPGTPARFSGSLLGGKAALTLSGVQPEDEAEYYCVLWYSNRWVFGGGTKLTVLGGGGSQRFVTGHFGGLHPANGGGGGSGGGSRDWDFDVFGGGTPVGGHHHHHH

SEQ ID NO: 494 - protein, 571 aa, Artificial Sequence
  Synthetic polypeptide
QRFVTGHFGGLYPANGGGGGSQVQLVQSGAEVKKPGASVKVSCKASGYTFTYYGISWVRQAPGQGLEWMGWINPYSGATNYAQKLQGRVTMTTDTSTSTAYMELRSLRSDDTAVYYCARGSGGFDYWGQGTLVTVSSGGGGSGGGGSGGGGSDIVMTQTPLSLSVTPGEPASISCRSSQSLLHSNGYNYLDWYLQKPGQSPQLLIYLGSYRASGVPDRFSGSGSGTDFTLKISRVEAEDVGVYYCMQALQTPFTFGPGTKVDIKSGGGGSEVQLVESGGGLVQPGGSLKLSCAASGFTFNKYAMNWVRQAPGKGLEWVARIRSKYNNYATYYADSVKDRFTISRDDSKNTAYLQMNNLKTEDTAVYYCVRHGNFGNSYISYWAYWGQGTLVTVSSGGGGSGGGGSGGGGSQTVVTQEPSLTVSPGGTVTLTCGSSTGAVTSGNYPNWVQQKPGQAPRGLIGGTKFLAPGTPARFSGSLLGGKAALTLSGVQPEDEAEYYCVLWYSNRWVFGGGTKLTVLGGGGSQRFVTGHFGGLHPANGGGGGSGGGSRDWDFDVFGGGTPVGGHHHHHH

SEQ ID NO: 495 - protein, 571 aa, Artificial Sequence
  Synthetic polypeptide
QRFVTGHFGGLYPANGGGGGSQVQLVQSGAEVKKPGASVKVSCKASGYTFTYYGISWVRQAPGQGLEWMGWINPYTGKTNYAQKLQGRVTMTTDTSTSTAYMELRSLRSDDTAVYYCARGSGGFDYWGQGTLVTVSSGGGGSGGGGSGGGGSDIVMTQTPLSLSVTPGEPASISCRSSQSLLHSNGYNYLDWYLQKPGQSPQLLIYLGSYRASGVPDRFSGSGSGTDFTLKISRVEAEDVGVYYCMQALQTPFTFGPGTKVDIKSGGGGSEVQLVESGGGLVQPGGSLKLSCAASGFTFNKYAMNWVRQAPGKGLEWVARIRSKYNNYATYYADSVKDRFTISRDDSKNTAYLQMNNLKTEDTAVYYCVRHGNFGNSYISYWAYWGQGTLVTVSSGGGGSGGGGSGGGGSQTVVTQEPSLTVSPGGTVTLTCGSSTGAVTSGNYPNWVQQKPGQAPRGLIGGTKFLAPGTPARFSGSLLGGKAALTLSGVQPEDEAEYYCVLWYSNRWVFGGGTKLTVLGGGGSQRFVTGHFGGLHPANGGGGGSGGGSRDWDFDVFGGGTPVGGHHHHHH

SEQ ID NO: 496 - protein, 571 aa, Artificial Sequence
  Synthetic polypeptide
QRFVTGHFGGLYPANGGGGGSQVQLVQSGAEVKKPGASVKVSCKASGYTFTYYGISWVRQAPGQGLEWMGWINPYTGKTNYAQKLQGRVTMTTDTSTSTAYMELRSLRSDDTAVYYCARGSGGFDYWGQGTLVTVSSGGGGSGGGGSGGGGSDIVMTQTPLSLSVTPGEPASISCRSSQSLLHSVGYNYLDWYLQKPGQSPQLLIYLGSYRASGVPDRFSGSGSGTDFTLKISRVEAEDVGVYYCMQALQTPFTFGPGTKVDIKSGGGGSEVQLVESGGGLVQPGGSLKLSCAASGFTFNKYAMNWVRQAPGKGLEWVARIRSKYNNYATYYADSVKDRFTISRDDSKNTAYLQMNNLKTEDTAVYYCVRHGNFGNSYISYWAYWGQGTLVTVSSGGGGSGGGGSGGGGSQTVVTQEPSLTVSPGGTVTLTCGSSTGAVTSGNYPNWVQQKPGQAPRGLIGGTKFLAPGTPARFSGSLLGGKAALTLSGVQPEDEAEYYCVLWYSNRWVFGGGTKLTVLGGGGSQRFVTGHFGGLHPANGGGGGSGGGSRDWDFDVFGGGTPVGGHHHHHH

SEQ ID NO: 497 - protein, 571 aa, Artificial Sequence
  Synthetic polypeptide
QRFVTGHFGGLYPANGGGGGSQVQLVQSGAEVKKPGASVKVSCKASGYTFTSYGISWVRQAPGQGLEWMGWINPYTGNRNYAQKVQDRVTMTTDTSTNTAYMELSSLRSDDTAVYYCARGSGGFDYWGQGTLVTVSSGGGGSGGGGSGGGGSDIVMTQSPLSLPVTLGQPASISCRSSQSLLHSVGYNYLDWYLQKPGQSPQLLIYLGSNRASGVPDRFSGSGSGTDFTLKISRVEAEDVGVYYCMQALQTPFTFGPGTKLEIKSGGGGSEVQLVESGGGLVQPGGSLKLSCAASGFTFNKYAMNWVRQAPGKGLEWVARIRSKYNNYATYYADSVKDRFTISRDDSKNTAYLQMNNLKTEDTAVYYCVRHGNFGNSYISYWAYWGQGTLVTVSSGGGGSGGGGSGGGGSQTVVTQEPSLTVSPGGTVTLTCGSSTGAVTSGNYPNWVQQKPGQAPRGLIGGTKFLAPGTPARFSGSLLGGKAALTLSGVQPEDEAEYYCVLWYSNRWVFGGGTKLTVLGGGGSQRFVTGHFGGLHPANGGGGGSGGGSRDWDFDVFGGGTPVGGHHHHHH

SEQ ID NO: 498 - protein, 571 aa, Artificial Sequence
  Synthetic polypeptide
QRFVTGHFGGLYPANGGGGGSQVQLVQSGAEVKKPGASVKVSCKASGYTFTYYGISWVRQAPGQGLEWMGWINPYTGKTNYAQKLQDRVTMTTDTSTNTAYMELRSLRSDDTAVYYCARGSGGFDYWGQGTLVTVSSGGGGSGGGGSGGGGSDIVMTQTPLSLPVTPGEPASISCRSSQSLLHSVGYNYLDWYLQKPGQSPQLLIYLGSNRASGVPDRFSGSGSGTDFTLKISRVEAEDVGVYYCMQALQTPFTFGPGTKVDIKSGGGGSEVQLVESGGGLVQPGGSLKLSCAASGFTFNKYAMNWVRQAPGKGLEWVARIRSKYNNYATYYADSVKDRFTISRDDSKNTAYLQMNNLKTEDTAVYYCVRHGNFGNSYISYWAYWGQGTLVTVSSGGGGSGGGGSGGGGSQTVVTQEPSLTVSPGGTVTLTCGSSTGAVTSGNYPNWVQQKPGQAPRGLIGGTKFLAPGTPARFSGSLLGGKAALTLSGVQPEDEAEYYCVLWYSNRWVFGGGTKLTVLGGGGSQRFVTGHFGGLHPANGGGGGSGGGSRDWDFDVFGGGTPVGGHHHHHH

SEQ ID NO: 499 - protein, 571 aa, Artificial Sequence
  Synthetic polypeptide
QRFVTGHFGGLYPANGGGGGSQVQLVQSGAEVKKPGASVKVSCKASGYTFTTYGISWVRQAPGQGLEWMGWINPYTGKTNYAQKLQGRVTMATDTSTSTAYMELRSLRSDDTAVYYCARGSGGFDYWGQGTLVTVSSGGGGSGGGGSGGGGSDIVMTQSPLSLPVTPGEPASISCRSSQSLLHSVGYNYLDWYLQKPGQSPQLLIYLGSNRASGVPDRFSGSGSGTDFTLKISRVEAEDVGVYYCMQALQTPFTFGPGTKLEIKSGGGGSEVQLVESGGGLVQPGGSLKLSCAASGFTFNKYAMNWVRQAPGKGLEWVARIRSKYNNYATYYADSVKDRFTISRDDSKNTAYLQMNNLKTEDTAVYYCVRHGNFGNSYISYWAYWGQGTLVTVSSGGGGSGGGGSGGGGSQTVVTQEPSLTVSPGGTVTLTCGSSTGAVTSGNYPNWVQQKPGQAPRGLIGGTKFLAPGTPARFSGSLLGGKAALTLSGVQPEDEAEYYCVLWYSNRWVFGGGTKLTVLGGGGSQRFVTGHFGGLHPANGGGGGSGGGSRDWDFDVFGGGTPVGGHHHHHH

SEQ ID NO: 500 - protein, 571 aa, Artificial Sequence
  Synthetic polypeptide
QRFVTGHFGGLYPANGGGGGSQVQLVQSGAEVKEPGASVKVSCKASGYTFTYYGISWVRQAPGQGLEWMGWINPYTGNRNYAQKVQDRVTMTTDTSTNTAYMELRSLRSDDTAVYYCARGSGGFDYWGQGTLVTVSSGGGGSGGGGSGGGGSDIVMTQSPLSLPVTPGEPASISCRSSQSLLHSVGYNYLDWYLQKPGQSPQLLIYLGSNRASGVPDRFSGSGSGTDFTLKISRVEAEDVGVYYCMQALQTPFTFGPGTKLEIKSGGGGSEVQLVESGGGLVQPGGSLKLSCAASGFTFNKYAMNWVRQAPGKGLEWVARIRSKYNNYATYYADSVKDRFTISRDDSKNTAYLQMNNLKTEDTAVYYCVRHGNFGNSYISYWAYWGQGTLVTVSSGGGGSGGGGSGGGGSQTVVTQEPSLTVSPGGTVTLTCGSSTGAVTSGNYPNWVQQKPGQAPRGLIGGTKFLAPGTPARFSGSLLGGKAALTLSGVQPEDEAEYYCVLWYSNRWVFGGGTKLTVLGGGGSQRFVTGHFGGLHPANGGGGGSGGGSRDWDFDVFGGGTPVGGHHHHHH

SEQ ID NO: 501 - protein, 571 aa, Artificial Sequence
  Synthetic polypeptide
QRFVTGHFGGLYPANGGGGGSQVQLVQSGAEVKKPGASVKVSCKASGYTFTYYGISWVRQAPGQGLEWMGWINPYTGKTNYAQKLQGRVTMTTDTSTSTAYMELRSLRSDDTAVYYCARGSGGFDYWGQGTLVTVSSGGGGSGGGGSGGGGSDIVMTQSPLSLPVTPGEPASISCRSSQSLLHSVGYNYLDWYLQKPGQSPQLLIYLGSNRASGVPDRFSGSGSGTDFTLKISRVEAEDVGVYYCMQALQTPFTFGPGTKVEIKSGGGGSEVQLVESGGGLVQPGGSLKLSCAASGFTFNKYAMNWVRQAPGKGLEWVARIRSKYNNYATYYADSVKDRFTISRDDSKNTAYLQMNNLKTEDTAVYYCVRHGNFGNSYISYWAYWGQGTLVTVSSGGGGSGGGGSGGGGSQTVVTQEPSLTVSPGGTVTLTCGSSTGAVTSGNYPNWVQQKPGQAPRGLIGGTKFLAPGTPARFSGSLLGGKAALTLSGVQPEDEAEYYCVLWYSNRWVFGGGTKLTVLGGGGSQRFVTGHFGGLHPANGGGGGSGGGSRDWDFDVFGGGTPVGGHHHHHH

SEQ ID NO: 502 - protein, 571 aa, Artificial Sequence
  Synthetic polypeptide
QRFVTGHFGGLYPANGGGGGSQVQLVQSGAEVKKPGASVKVSCKASGYTFTSYGITWVRQAPGQGLEWMGWINPYTGNRNYAQKVQGRVTMTTDTSTSTAYMELRSLRSDDTAVYYCARGSGGFDYWGQGTLVTVSSGGGGSGGGGSGGGGSDIVMTQSPLSLSVTPGEPASISCRSSQSLLHSVGYNYLDWYLQKPGQSPQLLIYLGSNRASGVPDRFSGSGSGTDFTLKISRVEAEDVGVYYCMQALQTPFTFGPGTKVDIKSGGGGSEVQLVESGGGLVQPGGSLKLSCAASGFTFNKYAMNWVRQAPGKGLEWVARIRSKYNNYATYYADSVKDRFTISRDDSKNTAYLQMNNLKTEDTAVYYCVRHGNFGNSYISYWAYWGQGTLVTVSSGGGGSGGGGSGGGGSQTVVTQEPSLTVSPGGTVTLTCGSSTGAVTSGNYPNWVQQKPGQAPRGLIGGTKFLAPGTPARFSGSLLGGKAALTLSGVQPEDEAEYYCVLWYSNRWVFGGGTKLTVLGGGGSQRFVTGHFGGLHPANGGGGGSGGGSRDWDFDVFGGGTPVGGHHHHHH

SEQ ID NO: 503 - protein, 571 aa, Artificial Sequence
  Synthetic polypeptide
QRFVTGHFGGLYPANGGGGGSQVQLVQSGAEVKKPGASVKVSCKASGYTFTSYGISWVRQAPGQGLEWMGWINPYTGNRNYAQKFQGRVTMTTDTSTNTAYMELSSLRSEDTAVYYCARGSGGFDYWGQGTLVTVSSGGGGSGGGGSGGGGSDIVMTQSPLSLPVTPGEPASISCRSSQSLLHSVGYNYLDWYLQKPGQSPQLLIYLGSNRASGVPDRFSGSGSGTDFTLKISRVEAEDVGVYYCMQALQTPFTFGPGTKVDIKSGGGGSEVQLVESGGGLVQPGGSLKLSCAASGFTFNKYAMNWVRQAPGKGLEWVARIRSKYNNYATYYADSVKDRFTISRDDSKNTAYLQMNNLKTEDTAVYYCVRHGNFGNSYISYWAYWGQGTLVTVSSGGGGSGGGGSGGGGSQTVVTQEPSLTVSPGGTVTLTCGSSTGAVTSGNYPNWVQQKPGQAPRGLIGGTKFLAPGTPARFSGSLLGGKAALTLSGVQPEDEAEYYCVLWYSNRWVFGGGTKLTVLGGGGSQRFVTGHFGGLHPANGGGGGSGGGSRDWDFDVFGGGTPVGGHHHHHH

SEQ ID NO: 504 - protein, 571 aa, Artificial Sequence
  Synthetic polypeptide
QRFVTGHFGGLYPANGGGGGSQVQLVQSGAEVKKPGASVKVSCKASGYSFTSYGISWVRQAPGQGLEWMGWINPYTGNRNYAQKVQGRVTMTTDTSTSTAYMELRSLRSDDTAVYYCARGSGGFDYWGQGTLVTVSSGGGGSGGGGSGGGGSDIVMTQSPLSLPVTPGEPASISCRSSQSLLHSVGYNYLDWYLQKPGQSPQLLIYLGSNRASGVPDRFSGSGSGTDFTLKISRVEAEDVGVYYCMQALQTPFTFGPGTKVEIKSGGGGSEVQLVESGGGLVQPGGSLKLSCAASGFTFNKYAMNWVRQAPGKGLEWVARIRSKYNNYATYYADSVKDRFTISRDDSKNTAYLQMNNLKTEDTAVYYCVRHGNFGNSYISYWAYWGQGTLVTVSSGGGGSGGGGSGGGGSQTVVTQEPSLTVSPGGTVTLTCGSSTGAVTSGNYPNWVQQKPGQAPRGLIGGTKFLAPGTPARFSGSLLGGKAALTLSGVQPEDEAEYYCVLWYSNRWVFGGGTKLTVLGGGGSQRFVTGHFGGLHPANGGGGGSGGGSRDWDFDVFGGGTPVGGHHHHHH

SEQ ID NO: 505 - protein, 571 aa, Artificial Sequence
  Synthetic polypeptide
QRFVTGHFGGLYPANGGGGGSQVQLVQSGAEVKKPGASVKVSCKASGYTFTYYGISWVRQAPGQGLEWMGWINPYTGKTNYAQKVQGRVTMTTDTSTSTAYMELRNLRSDDTAVYYCARGSGGFDYWGQGTLVTVSSGGGGSGGGGSGGGGSDIVMTQTPLSLSVTPGQPASISCRSSQSLLHSVGYNYLDWYLQKPGQSPQLLIYLGSNRASGVPDRFSGSGSGTDFTLKISRVEAEDVGVYYCMQALQTPFTFGPGTKVDIKSGGGGSEVQLVESGGGLVQPGGSLKLSCAASGFTFNKYAMNWVRQAPGKGLEWVARIRSKYNNYATYYADSVKDRFTISRDDSKNTAYLQMNNLKTEDTAVYYCVRHGNFGNSYISYWAYWGQGTLVTVSSGGGGSGGGGSGGGGSQTVVTQEPSLTVSPGGTVTLTCGSSTGAVTSGNYPNWVQQKPGQAPRGLIGGTKFLAPGTPARFSGSLLGGKAALTLSGVQPEDEAEYYCVLWYSNRWVFGGGTKLTVLGGGGSQRFVTGHFGGLHPANGGGGGSGGGSRDWDFDVFGGGTPVGGHHHHHH

SEQ ID NO: 506 - protein, 571 aa, Artificial Sequence
  Synthetic polypeptide
QRFVTGHFGGLYPANGGGGGSQVQLVQSGAEVKKPGASVKVSCKASGYTFTYYGISWVRQAPGQGLEWMGWINPYTGKTNYAQKLQGRVTMTTDTSTSTAYMELRSLRSDDTAVYYCARGSGGFDYWGQGTLVTVSSGGGGSGGGGSGGGGSDIVMTQTPLSLSVTPGQPASISCRSSQSLLHSVGYNYLDWYLQKPGQSPQLLIYLGSNRASGVPDRFSGSGSGTDFTLKISRVEAEDVGVYYCMQALQTPFTFGPGTKVDIKSGGGGSEVQLVESGGGLVQPGGSLKLSCAASGFTFNKYAMNWVRQAPGKGLEWVARIRSKYNNYATYYADSVKDRFTISRDDSKNTAYLQMNNLKTEDTAVYYCVRHGNFGNSYISYWAYWGQGTLVTVSSGGGGSGGGGSGGGGSQTVVTQEPSLTVSPGGTVTLTCGSSTGAVTSGNYPNWVQQKPGQAPRGLIGGTKFLAPGTPARFSGSLLGGKAALTLSGVQPEDEAEYYCVLWYSNRWVFGGGTKLTVLGGGGSQRFVTGHFGGLHPANGGGGGSGGGSRDWDFDVFGGGTPVGGHHHHHH

SEQ ID NO: 507 - protein, 575 aa, Artificial Sequence
  Synthetic polypeptide
QRFVTGHFGGLYPANGGGGGSQVQLVESGGGVVQPGRSLRLSCAASGFTFRNYAMHWVRQAPGKGLEWVAVISYSGNNKYYASSVKGRFTISRDNSKNTLYLQLNSLRAEDTAVYYCAREFYYDSTGYDYSTPGDYWGQGTLVTVSSGGGGSGGGGSGGGGSDIQMTQSPSSLSASVGDRVTITCQASQDISNYLNWYQQKPGKAPKLLIYDASNLETGVPSRFSGSGSGTDFTFTISSLQPEDIATYYCQQYDNLPTFGQGTRLEIKSGGGGSEVQLVESGGGLVQPGGSLKLSCAASGFTFNKYAMNWVRQAPGKGLEWVARIRSKYNNYATYYADSVKDRFTISRDDSKNTAYLQMNNLKTEDTAVYYCVRHGNFGNSYISYWAYWGQGTLVTVSSGGGGSGGGGSGGGGSQTVVTQEPSLTVSPGGTVTLTCGSSTGAVTSGNYPNWVQQKPGQAPRGLIGGTKFLAPGTPARFSGSLLGGKAALTLSGVQPEDEAEYYCVLWYSNRWVFGGGTKLTVLGGGGSQRFVTGHFGGLHPANGGGGGSGGGSRDWDFDVFGGGTPVGGHHHHHH

SEQ ID NO: 508 - protein, 576 aa, Artificial Sequence
  Synthetic polypeptide
QRFVTGHFGGLYPANGGGGGSQVQLVESGGGVVQPGRSLRLSCVASGFTFRNYAMHWVRQAPGKGLEWVAVISYSGNNKYYASSVKGRFTISRDNSKNTLYLQLNSLRAEDTAVYYCAREFYYDSTGYDYSTPGDYWGQGTLVTVSSGGGGSGGGGSGGGGSDIQMTQSPSSLSASVGDRVTITCRASQSISSYLNWYQQKPGKAPKLLIYDASSLQSGVPSRFSGSGSGTEFTLTISSLQAEDVAVYYCQQYYSTPLTFGGGTKVDIKSGGGGSEVQLVESGGGLVQPGGSLKLSCAASGFTFNKYAMNWVRQAPGKGLEWVARIRSKYNNYATYYADSVKDRFTISRDDSKNTAYLQMNNLKTEDTAVYYCVRHGNFGNSYISYWAYWGQGTLVTVSSGGGGSGGGGSGGGGSQTVVTQEPSLTVSPGGTVTLTCGSSTGAVTSGNYPNWVQQKPGQAPRGLIGGTKFLAPGTPARFSGSLLGGKAALTLSGVQPEDEAEYYCVLWYSNRWVFGGGTKLTVLGGGGSQRFVTGHFGGLHPANGGGGGSGGGSRDWDFDVFGGGTPVGGHHHHHH

SEQ ID NO: 509 - protein, 576 aa, Artificial Sequence
  Synthetic polypeptide
QRFVTGHFGGLYPANGGGGGSQVQLVESGGGVVQPGRSLRLSCAASGFTFRNYAMHWVRQAPGKGLEWVAGISYSGTNKYYASSVKGRFTISRDNSKNTLYLQLNSLRAEDTAVYYCAREFYYDSTGYDYSTPGDYWGQGTLVTVSSGGGGSGGGGSGGGGSDIQMTQSPSSLSASVGDRVTITCQASQDISNYLNWYQQKPGKAPKLLIYDASNLETGVPSRFSGSGSGTEFTLTISSLQPEDIATYYCQQYDNLPLTFGGGTKVDIKSGGGGSEVQLVESGGGLVQPGGSLKLSCAASGFTFNKYAMNWVRQAPGKGLEWVARIRSKYNNYATYYADSVKDRFTISRDDSKNTAYLQMNNLKTEDTAVYYCVRHGNFGNSYISYWAYWGQGTLVTVSSGGGGSGGGGSGGGGSQTVVTQEPSLTVSPGGTVTLTCGSSTGAVTSGNYPNWVQQKPGQAPRGLIGGTKFLAPGTPARFSGSLLGGKAALTLSGVQPEDEAEYYCVLWYSNRWVFGGGTKLTVLGGGGSQRFVTGHFGGLHPANGGGGGSGGGSRDWDFDVFGGGTPVGGHHHHHH

SEQ ID NO: 510 - protein, 576 aa, Artificial Sequence
  Synthetic polypeptide
QRFVTGHFGGLYPANGGGGGSQVQLVESGGGVVQPGRSLRLSCVASGFTFRNYAMHWVRQAPGKGLEWVAVISYSGNNKYYASSVKGRFTISRDNSKNTLFLQLNSLRAEDTAVYYCAREFYYDSTGYDYSTPGNYWGQGTLVTVSSGGGGSGGGGSGGGGSDIQMTQSPSSLSASVGDRVTITCQASQDISNYLNWYQQKPGKAPKLLIYDASNLETGVPSRFSGSGSGTDFTFTISSLQPEDIATYYCQQYVNLPLTFGGGTKLEIKSGGGGSEVQLVESGGGLVQPGGSLKLSCAASGFTFNKYAMNWVRQAPGKGLEWVARIRSKYNNYATYYADSVKDRFTISRDDSKNTAYLQMNNLKTEDTAVYYCVRHGNFGNSYISYWAYWGQGTLVTVSSGGGGSGGGGSGGGGSQTVVTQEPSLTVSPGGTVTLTCGSSTGAVTSGNYPNWVQQKPGQAPRGLIGGTKFLAPGTPARFSGSLLGGKAALTLSGVQPEDEAEYYCVLWYSNRWVFGGGTKLTVLGGGGSQRFVTGHFGGLHPANGGGGGSGGGSRDWDFDVFGGGTPVGGHHHHHH

SEQ ID NO: 511 - protein, 573 aa, Artificial Sequence
  Synthetic polypeptide
QRFVTGHFGGLYPANGGGGGSQVQLVESGGGVVQPGRSLRLSCAASGFTFSSYGMQWVRQAPGKGLEWVAVIWYSGSNKYYASSVKGRFTISRDNSKNTLYLQMNSLRAEDTAVYYCARDGYPIFYRYYGMDVWGQGTTVTVSSGGGGSGGGGSGGGGSDIQMTQSPSSLSASVGDRVTITCRASQGISNYLAWYQQKPGKVPKLLIYAASTLQSGVPSRFSGSGSGTDFTLTISSLQPEDVATYYCQKYNSAPLTFGGGTKVEIKSGGGGSEVQLVESGGGLVQPGGSLKLSCAASGFTFNKYAMNWVRQAPGKGLEWVARIRSKYNNYATYYADSVKDRFTISRDDSKNTAYLQMNNLKTEDTAVYYCVRHGNFGNSYISYWAYWGQGTLVTVSSGGGGSGGGGSGGGGSQTVVTQEPSLTVSPGGTVTLTCGSSTGAVTSGNYPNWVQQKPGQAPRGLIGGTKFLAPGTPARFSGSLLGGKAALTLSGVQPEDEAEYYCVLWYSNRWVFGGGTKLTVLGGGGSQRFVTGHFGGLHPANGGGGGSGGGSRDWDFDVFGGGTPVGGHHHHHH

SEQ ID NO: 512 - protein, 574 aa, Artificial Sequence
  Synthetic polypeptide
QRFVTGHFGGLYPANGGGGGSQVQLVESGGGVVQPGRSLRLSCAASGFTFSSYGMHWVRQAPGKGLEWVAVISYSGSNKYYASSVKGRFTISRDNSKNTLYLQMNSLRAEDTAVYYCARDGYPIFYRYYGMDVWGQGTTVTVSSGGGGSGGGGSGGGGSEIVLTQSPGTLSLSPGERATLSCRASQSVSSSYLAWYQQKPGQAPRLLIYGASSRATGIPDRFSGSGSGTDFTLTISRLEPEDLAVYYCQQYGTSPLTFGGGTKLEIKSGGGGSEVQLVESGGGLVQPGGSLKLSCAASGFTFNKYAMNWVRQAPGKGLEWVARIRSKYNNYATYYADSVKDRFTISRDDSKNTAYLQMNNLKTEDTAVYYCVRHGNFGNSYISYWAYWGQGTLVTVSSGGGGSGGGGSGGGGSQTVVTQEPSLTVSPGGTVTLTCGSSTGAVTSGNYPNWVQQKPGQAPRGLIGGTKFLAPGTPARFSGSLLGGKAALTLSGVQPEDEAEYYCVLWYSNRWVFGGGTKLTVLGGGGSQRFVTGHFGGLHPANGGGGGSGGGSRDWDFDVFGGGTPVGGHHHHHH

SEQ ID NO: 513 - protein, 574 aa, Artificial Sequence
  Synthetic polypeptide
QRFVTGHFGGLYPANGGGGGSQVQLVESGGGVVQPGRSLRLSCAASGFTFSSFGMHWVRQAPGKGLEWVAFIWYSGSNKYYASSVKGRVTISRDNSKNTLYLQMNSLRAEDTAVYYCARDGYPIFYYYYGMDVWGQGTTVTVSSGGGGSGGGGSGGGGSEIVLTQSPGTLSLSPGERATLSCRASQSVSSSYLAWYQQKPGQAPRLLIYGASSRATGIPDRFSGSGSGTDFTLTISRLEPEDFAVYYCQQYGSSPFTFGPGTRLEIKSGGGGSEVQLVESGGGLVQPGGSLKLSCAASGFTFNKYAMNWVRQAPGKGLEWVARIRSKYNNYATYYADSVKDRFTISRDDSKNTAYLQMNNLKTEDTAVYYCVRHGNFGNSYISYWAYWGQGTLVTVSSGGGGSGGGGSGGGGSQTVVTQEPSLTVSPGGTVTLTCGSSTGAVTSGNYPNWVQQKPGQAPRGLIGGTKFLAPGTPARFSGSLLGGKAALTLSGVQPEDEAEYYCVLWYSNRWVFGGGTKLTVLGGGGSQRFVTGHFGGLHPANGGGGGSGGGSRDWDFDVFGGGTPVGGHHHHHH

SEQ ID NO: 514 - protein, 549 aa, Artificial Sequence
  Synthetic polypeptide
QRFCTGHFGGLHPCNGGGGGSQVQLVESGGGVVQPGGSLRLSCAASGFTFSSYGMHWVRQAPGKGLEWVAFIWYDGSNKYYADSVKGRFTISRDNSKNTLYLQMNSLRAEDTAVYYCARRAGIIGTIGYYYGMDVWGQGTTVTVSSGGGGSGGGGSGGGGSSYELTQPPSVSVSPGQTASITCSGDRLGEKYTSWYQQRPGQSPLLVIYQDTKRPSGIPERFSGSNSGNTATLTISGTQAMDEADYYCQAWESSTVVFGGGTKLTVLSGGGGSEVQLVESGGGLVQPGGSLKLSCAASGFTFNKYAMNWVRQAPGKGLEWVARIRSKYNNYATYYADSVKDRFTISRDDSKNTAYLQMNNLKTEDTAVYYCVRHGNFGNSYISYWAYWGQGTLVTVSSGGGGSGGGGSGGGGSQTVVTQEPSLTVSPGGTVTLTCGSSTGAVTSGNYPNWVQQKPGQAPRGLIGGTKFLAPGTPARFSGSLLGGKAALTLSGVQPEDEAEYYCVLWYSNRWVFGGGTKLTVLGGGGSQRFVTGHFGGLHPANGHHHHHH

SEQ ID NO: 515 - protein, 546 aa, Artificial Sequence
  Synthetic polypeptide
QRFCTGHFGGLHPCNGGGGGSQVQLQESGPGLVKPSQTLSLTCTVSGGSISRGGYYWSWIRQHPGKGLEWIGYIFYRGRTYYNPSLKSRVTISVDTSKNQFSLKLSSVTAADTAVYYCARVNSNYGWFDPWGQGTLVTVSSGGGGSGGGGSGGGGSEIVLTQFPGTLSLSPGERATLSCRASQSVSSSYLAWYQQKPGQAPRLLIYGASSRATGIPDRFSGSGSGTDFTLTISRLEPEDFAVYYCQQYGSSPLTFGGGTKLEIKSGGGGSEVQLVESGGGLVQPGGSLKLSCAASGFTFNKYAMNWVRQAPGKGLEWVARIRSKYNNYATYYADSVKDRFTISRDDSKNTAYLQMNNLKTEDTAVYYCVRHGNFGNSYISYWAYWGQGTLVTVSSGGGGSGGGGSGGGGSQTVVTQEPSLTVSPGGTVTLTCGSSTGAVTSGNYPNWVQQKPGQAPRGLIGGTKFLAPGTPARFSGSLLGGKAALTLSGVQPEDEAEYYCVLWYSNRWVFGGGTKLTVLGGGGSQRFVTGHFGGLHPANGHHHHHH

SEQ ID NO: 516 - protein, 546 aa, Artificial Sequence
  Synthetic polypeptide
QRFCTGHFGGLHPCNGGGGGSQVQLQESGPGLVKPSQTLSLTCTVSGGSISSGGYYWSWIRQHPGKGLEWIGYIFYRGRTYYNPSLKSRVTISVDTSKNQFSLKLSSVTAADTAVYYCARVYSNYGWFDPWGQGTLVTVSSGGGGSGGGGSGGGGSEIVLTQSPGTLSLSPGERATLSCRASQSVSSSYLAWYQQKPGQAPRLLIYGTSNRATGIPDRFSGSGSGTDFTLTISRLEPEDFAVYYCQQYGSSPLTFGGGTKLEIKSGGGGSEVQLVESGGGLVQPGGSLKLSCAASGFTFNKYAMNWVRQAPGKGLEWVARIRSKYNNYATYYADSVKDRFTISRDDSKNTAYLQMNNLKTEDTAVYYCVRHGNFGNSYISYWAYWGQGTLVTVSSGGGGSGGGGSGGGGSQTVVTQEPSLTVSPGGTVTLTCGSSTGAVTSGNYPNWVQQKPGQAPRGLIGGTKFLAPGTPARFSGSLLGGKAALTLSGVQPEDEAEYYCVLWYSNRWVFGGGTKLTVLGGGGSQRFVTGHFGGLHPANGHHHHHH

SEQ ID NO: 517 - protein, 546 aa, Artificial Sequence
  Synthetic polypeptide
QRFCTGHFGGLHPCNGGGGGSQVQLQESGPGLVKPSQTLSLTCTVSGGSISSGGYYWSWIRQHPGKGLEWIGYIFYSGRTYYNPSLKSRVTISVDTSKNQFSLKLSSVTAADTAVYYCARVYSNYGWFDPWGQGTLVTVSSGGGGSGGGGSGGGGSEIVLTQSPGTLSLSPGERATLSCRASQSVSSSYLAWYQQKPGQAPRLLIYGASSRATGIPDRFSGSGSGTDFTLTISRLEPEDFAVYYCQQYGSSPLTFGGGTKLEIKSGGGGSEVQLVESGGGLVQPGGSLKLSCAASGFTFNKYAMNWVRQAPGKGLEWVARIRSKYNNYATYYADSVKDRFTISRDDSKNTAYLQMNNLKTEDTAVYYCVRHGNFGNSYISYWAYWGQGTLVTVSSGGGGSGGGGSGGGGSQTVVTQEPSLTVSPGGTVTLTCGSSTGAVTSGNYPNWVQQKPGQAPRGLIGGTKFLAPGTPARFSGSLLGGKAALTLSGVQPEDEAEYYCVLWYSNRWVFGGGTKLTVLGGGGSQRFVTGHFGGLHPANGHHHHHH

SEQ ID NO: 518 - protein, 546 aa, Artificial Sequence
  Synthetic polypeptide
QRFCTGHFGGLHPCNGGGGGSQVQLQESGPGLVKPSQTLSLTCTVSGGSISSGGYYWSWIRQHPGKGLEWIGYIFYSGRTYYNPSLKSRVTISVDTSKNQFSLKLRSVTAADTAVYYCARVYSNYGWFDPWGQGTLVTVSSGGGGSGGGGSGGGGSEIVLTQSPGTLSLSPGERATLSCRASQSVSSSYLAWYQQKPGQAPRLLIYGASSRATGIPDRFSGSGSGTDFTLTISRLEPEDFAVYYCQQYGSSPLTFGGGTKLEIKSGGGGSEVQLVESGGGLVQPGGSLKLSCAASGFTFNKYAMNWVRQAPGKGLEWVARIRSKYNNYATYYADSVKDRFTISRDDSKNTAYLQMNNLKTEDTAVYYCVRHGNFGNSYISYWAYWGQGTLVTVSSGGGGSGGGGSGGGGSQTVVTQEPSLTVSPGGTVTLTCGSSTGAVTSGNYPNWVQQKPGQAPRGLIGGTKFLAPGTPARFSGSLLGGKAALTLSGVQPEDEAEYYCVLWYSNRWVFGGGTKLTVLGGGGSQRFVTGHFGGLHPANGHHHHHH

SEQ ID NO: 519 - protein, 546 aa, Artificial Sequence
  Synthetic polypeptide
QRFCTGHFGGLHPCNGGGGGSQVQLQESGPGLVKPSQTLSLTCTVSGGSISSGGYYWSWIRQHPGKGLEWIGYIYYSGSTFYNPSLRSRVTISVDTSKNQFSLKLSSVTAADTAVYYCARDSSSSRALDYWGQGTLVTVSSGGGGSGGGGSGGGGSEIVLTQSPGTLSLSPGERATLSCRASQSVSSSYLAWYQQKPGQAPRLLIYGASSRATGIPDRFSGSGSGTDFTLTISRLEPEDFAVYYCQQYDSSPRTFGQGTKLEIKSGGGGSEVQLVESGGGLVQPGGSLKLSCAASGFTFNKYAMNWVRQAPGKGLEWVARIRSKYNNYATYYADSVKDRFTISRDDSKNTAYLQMNNLKTEDTAVYYCVRHGNFGNSYISYWAYWGQGTLVTVSSGGGGSGGGGSGGGGSQTVVTQEPSLTVSPGGTVTLTCGSSTGAVTSGNYPNWVQQKPGQAPRGLIGGTKFLAPGTPARFSGSLLGGKAALTLSGVQPEDEAEYYCVLWYSNRWVFGGGTKLTVLGGGGSQRFVTGHFGGLHPANGHHHHHH

SEQ ID NO: 520 - protein, 546 aa, Artificial Sequence
  Synthetic polypeptide
QRFCTGHFGGLHPCNGGGGGSQVQLQESGPGLVKPSQTLSLTCTVSGGSISSGGYYWSWIRQHPGKGLEWIGYIYYRGRTYYNPSLKSRVTISVDTSKNQFSLKLSSVTAADTAVYYCARVYSNYGWFDPWGQGTLVTVSSGGGGSGGGGSGGGGSEIVLTQSPGTLSLSPGERATLSCRASQSVSSSYLAWYQQKPGQAPRLLIYGASSRATGIPDRFSGSGSGTDFTLTISRLEPEDFAVYYCQQYGSSPLTFGGGTKLEIKSGGGGSEVQLVESGGGLVQPGGSLKLSCAASGFTFNKYAMNWVRQAPGKGLEWVARIRSKYNNYATYYADSVKDRFTISRDDSKNTAYLQMNNLKTEDTAVYYCVRHGNFGNSYISYWAYWGQGTLVTVSSGGGGSGGGGSGGGGSQTVVTQEPSLTVSPGGTVTLTCGSSTGAVTSGNYPNWVQQKPGQAPRGLIGGTKFLAPGTPARFSGSLLGGKAALTLSGVQPEDEAEYYCVLWYSNRWVFGGGTKLTVLGGGGSQRFVTGHFGGLHPANGHHHHHH

SEQ ID NO: 521 - protein, 545 aa, Artificial Sequence
  Synthetic polypeptide
QRFCTGHFGGLHPCNGGGGGSQVQLQESGPGLVKPSETLSLTCTVSGGSISSGGYYWSWIRQHPGKGLEWIGYIFYRGRTYYNPSLKSRVTISVDTSKNQFSLKLSSVTAADTAVYYCARVYSNYGWFDPWGQGTLVTVSSGGGGSGGGGSGGGGSEIVLTQSPGTLSLSPGERATLSCRASQSVSSSYLAWYQQKPGQAPRLLIYGASSRATGIPDRFSGSGSGTDFTLTISRLEPEDFAVYYCQQYGSSPTFGGGTKVEIKSGGGGSEVQLVESGGGLVQPGGSLKLSCAASGFTFNKYAMNWVRQAPGKGLEWVARIRSKYNNYATYYADSVKDRFTISRDDSKNTAYLQMNNLKTEDTAVYYCVRHGNFGNSYISYWAYWGQGTLVTVSSGGGGSGGGGSGGGGSQTVVTQEPSLTVSPGGTVTLTCGSSTGAVTSGNYPNWVQQKPGQAPRGLIGGTKFLAPGTPARFSGSLLGGKAALTLSGVQPEDEAEYYCVLWYSNRWVFGGGTKLTVLGGGGSQRFVTGHFGGLHPANGHHHHHH

SEQ ID NO: 522 - protein, 546 aa, Artificial Sequence
  Synthetic polypeptide
QRFCTGHFGGLHPCNGGGGGSQVQLQESGPGLVKPSQTLSLTCTVSGGSISSGGYYWSWIRQHPGKGLEWIGYIFYRGRTYYNPSLKSRVTISVDTSKNQFSLKLSSVTAADTAVYYCARVYSNYGWFDPWGQGTLVTVSSGGGGSGGGGSGGGGSEIVLTQSPGTLSLSPGERATLSCRASQSVSSSYLAWYQQKPGQAPRLLIYGASSRATGIPDRFSGSGSGTDFTLTISRLEPEDFAVYYCQQYGSSPLTFGGGTKVEIKSGGGGSEVQLVESGGGLVQPGGSLKLSCAASGFTFNKYAMNWVRQAPGKGLEWVARIRSKYNNYATYYADSVKDRFTISRDDSKNTAYLQMNNLKTEDTAVYYCVRHGNFGNSYISYWAYWGQGTLVTVSSGGGGSGGGGSGGGGSQTVVTQEPSLTVSPGGTVTLTCGSSTGAVTSGNYPNWVQQKPGQAPRGLIGGTKFLAPGTPARFSGSLLGGKAALTLSGVQPEDEAEYYCVLWYSNRWVFGGGTKLTVLGGGGSQRFVTGHFGGLHPANGHHHHHH

SEQ ID NO: 523 - protein, 545 aa, Artificial Sequence
  Synthetic polypeptide
QRFCTGHFGGLHPCNGGGGGSQVQLQESGPGLVKPSQTLSLTCTVSGGSISSGGYYWSWIRQHPGKGLEWIGYIYYRGRTYYNPSLKSRVTISVDTSKNQFSLKLSSVTAADTAVYYCARVYSNYGWFDPWGQGTLVTVSSGGGGSGGGGSGGGGSEIVLTQSPGTLSLSPGERATLSCRASQSVSSSYLAWYQQKPGQAPRLLIYGASSRATGIPDRFSGSGSGTDFTLTISRLEPEDFAVYYCQQYGSSPTFGPGTKVEIKSGGGGSEVQLVESGGGLVQPGGSLKLSCAASGFTFNKYAMNWVRQAPGKGLEWVARIRSKYNNYATYYADSVKDRFTISRDDSKNTAYLQMNNLKTEDTAVYYCVRHGNFGNSYISYWAYWGQGTLVTVSSGGGGSGGGGSGGGGSQTVVTQEPSLTVSPGGTVTLTCGSSTGAVTSGNYPNWVQQKPGQAPRGLIGGTKFLAPGTPARFSGSLLGGKAALTLSGVQPEDEAEYYCVLWYSNRWVFGGGTKLTVLGGGGSQRFVTGHFGGLHPANGHHHHHH

SEQ ID NO: 524 - protein, 545 aa, Artificial Sequence
  Synthetic polypeptide
QRFCTGHFGGLHPCNGGGGGSQVQLQESGPGLVKPSQTLSLTCTVSGGSISSGGYYWSWIRQHPGKGLEWIGYIYYRGRTYYNPSLKSRVTISVDTSKNQFSLKLSSVTAADTAVYYCARVYSNYGWFDPWGQGTLVTVSSGGGGSGGGGSGGGGSEIVLTQSPGTLSLSPGERATLSCRASQSVSSSYLAWYQQKPGQAPRLLIYGASSRATGIPDRFSGSGSGTDFTLTISRLEPEDFAVYYCQQYGSSPTFGGGTKVEIKSGGGGSEVQLVESGGGLVQPGGSLKLSCAASGFTFNKYAMNWVRQAPGKGLEWVARIRSKYNNYATYYADSVKDRFTISRDDSKNTAYLQMNNLKTEDTAVYYCVRHGNFGNSYISYWAYWGQGTLVTVSSGGGGSGGGGSGGGGSQTVVTQEPSLTVSPGGTVTLTCGSSTGAVTSGNYPNWVQQKPGQAPRGLIGGTKFLAPGTPARFSGSLLGGKAALTLSGVQPEDEAEYYCVLWYSNRWVFGGGTKLTVLGGGGSQRFVTGHFGGLHPANGHHHHHH

SEQ ID NO: 525 - protein, 545 aa, Artificial Sequence
  Synthetic polypeptide
QRFCTGHFGGLHPCNGGGGGSQVQLQESGPGLVKPSQTLSLTCTISGGSISSGGYYWSWIRQHPGKGLEWIGYIFYSGRTYYNPSLKSRVTISVDTSKNQFSLKLTSVTAADTAVYYCARVNSNYGWFDPWGQGTLVTVSSGGGGSGGGGSGGGGSEIVLTQSPGTLSLSPGERATLSCRASQSVSSSYLAWYQQKPGQAPRLLIYGASSRATGIPDRFSGSGSGTDFTLTISRLEPEDFAVYYCQQYGSSPTFGGGTKVEIKSGGGGSEVQLVESGGGLVQPGGSLKLSCAASGFTFNKYAMNWVRQAPGKGLEWVARIRSKYNNYATYYADSVKDRFTISRDDSKNTAYLQMNNLKTEDTAVYYCVRHGNFGNSYISYWAYWGQGTLVTVSSGGGGSGGGGSGGGGSQTVVTQEPSLTVSPGGTVTLTCGSSTGAVTSGNYPNWVQQKPGQAPRGLIGGTKFLAPGTPARFSGSLLGGKAALTLSGVQPEDEAEYYCVLWYSNRWVFGGGTKLTVLGGGGSQRFVTGHFGGLHPANGHHHHHH

SEQ ID NO: 526 - protein, 546 aa, Artificial Sequence
  Synthetic polypeptide
QRFCTGHFGGLHPCNGGGGGSQVQLQESGPGLVKPSQTLSLTCTVSGGSISSGGYYWSWIRQHPGKGLDWIGYIFYRGRTYYNPSLKSRVTISVDTSKNQFSLKLSSVTAADTAVYYCARVNSNYGWFDPWGQGTLVTVSSGGGGSGGGGSGGGGSEIVLTQSPGTLSLSPGERATLSCRASQSVSSSYLAWYQQKPGQAPRLLIYGASSRATGIPDRFSGSGSGTDFTLTISRLEPEDFAVYYCQQYGSSPLTFGGGTKVEIKSGGGGSEVQLVESGGGLVQPGGSLKLSCAASGFTFNKYAMNWVRQAPGKGLEWVARIRSKYNNYATYYADSVKDRFTISRDDSKNTAYLQMNNLKTEDTAVYYCVRHGNFGNSYISYWAYWGQGTLVTVSSGGGGSGGGGSGGGGSQTVVTQEPSLTVSPGGTVTLTCGSSTGAVTSGNYPNWVQQKPGQAPRGLIGGTKFLAPGTPARFSGSLLGGKAALTLSGVQPEDEAEYYCVLWYSNRWVFGGGTKLTVLGGGGSQRFVTGHFGGLHPANGHHHHHH

SEQ ID NO: 527 - protein, 545 aa, Artificial Sequence
  Synthetic polypeptide
QRFCTGHFGGLHPCNGGGGGSQVQLQESGPGLVKPSQTLSLTCTVSGGSISSGGYYWSWIRQHPGKGLEWIGYIYYRGRTYYNPSLKSRVTISVDTSKNQFSLKLSSVTAADTAVYYCARVYSNYGWFDPWGQGTLVTVSSGGGGSGGGGSGGGGSEIVLTQSPGTLSLSPGERATLSCRASQSVSSSYLAWYQQKPGQAPRLLIYGASTRATGIPDRFSGSGSGTDFTLTISRLEPEDFAVYYCQQYGSSPSFGQGTKVEIKSGGGGSEVQLVESGGGLVQPGGSLKLSCAASGFTFNKYAMNWVRQAPGKGLEWVARIRSKYNNYATYYADSVKDRFTISRDDSKNTAYLQMNNLKTEDTAVYYCVRHGNFGNSYISYWAYWGQGTLVTVSSGGGGSGGGGSGGGGSQTVVTQEPSLTVSPGGTVTLTCGSSTGAVTSGNYPNWVQQKPGQAPRGLIGGTKFLAPGTPARFSGSLLGGKAALTLSGVQPEDEAEYYCVLWYSNRWVFGGGTKLTVLGGGGSQRFVTGHFGGLHPANGHHHHHH

SEQ ID NO: 528 - protein, 546 aa, Artificial Sequence
  Synthetic polypeptide
QRFCTGHFGGLHPCNGGGGGSQVQLQESGPGLVRPSQTLSLTCTVSGGSISSGGYYWSWIRQHPGKGLEWIGYIYYRGRTYYNPSLKSRVTISVDTSKNQFSLKLSSVTAADTAVYYCARVYSNYGWFDPWGQGTLVTVSSGGGGSGGGGSGGGGSEIVLTQSPGTLSLSPGERATLSCRASQSVSSSYLAWYQQKPGQAPRLLIYGASSRATGIPDRFSGSGSGTDFTLTISRLEPEDFAVYYCQQYDTSPLTFGGGTKVEIKSGGGGSEVQLVESGGGLVQPGGSLKLSCAASGFTFNKYAMNWVRQAPGKGLEWVARIRSKYNNYATYYADSVKDRFTISRDDSKNTAYLQMNNLKTEDTAVYYCVRHGNFGNSYISYWAYWGQGTLVTVSSGGGGSGGGGSGGGGSQTVVTQEPSLTVSPGGTVTLTCGSSTGAVTSGNYPNWVQQKPGQAPRGLIGGTKFLAPGTPARFSGSLLGGKAALTLSGVQPEDEAEYYCVLWYSNRWVFGGGTKLTVLGGGGSQRFVTGHFGGLHPANGHHHHHH

SEQ ID NO: 529 - protein, 545 aa, Artificial Sequence; identical to SEQ ID NO: 524
  Synthetic polypeptide

SEQ ID NO: 530 - protein, 546 aa, Artificial Sequence
  Synthetic polypeptide
QRFCTGHFGGLHPCNGGGGGSQVQLQESGPGLVKPSQTLSLTCTVSGGSISSGGYYWSWIRQHPGKGLEWIGYIYYRGRTYYNPSLKSRVTISVDTSKNQFSLKLSSVTAADTAVYYCARVYSNYGWFDPWGQGTLVTVSSGGGGSGGGGSGGGGSEIVLTQSPGTLSLSPGERATLSCRASQSVSSSYLAWYQQKPGQAPRLLIYGASSRATGIPDRFSGSGSGTDFTLTISRLEPEDFAVYYCQQYGSSPLTFGGGTKVEIKSGGGGSEVQLVESGGGLVQPGGSLKLSCAASGFTFNKYAMNWVRQAPGKGLEWVARIRSKYNNYATYYADSVKDRFTISRDDSKNTAYLQMNNLKTEDTAVYYCVRHGNFGNSYISYWAYWGQGTLVTVSSGGGGSGGGGSGGGGSQTVVTQEPSLTVSPGGTVTLTCGSSTGAVTSGNYPNWVQQKPGQAPRGLIGGTKFLAPGTPARFSGSLLGGKAALTLSGVQPEDEAEYYCVLWYSNRWVFGGGTKLTVLGGGGSQRFVTGHFGGLHPANGHHHHHH

SEQ ID NO: 531 - protein, 546 aa, Artificial Sequence
  Synthetic polypeptide
QRFCTGHFGGLHPCNGGGGGSQVQLQESGPGLVKPSQTLSLTCTVSGGSISSGGYYWSWVRQHPGKGLEWIGYIFYSGRTYYNPSLKSRVIISVDTSKNQFSLKLSSVTAADTAVYYCARVYSNYGWFDPWGQGTLVTVSSGGGGSGGGGSGGGGSEIVLTQSPGTLSLSPGERATLSCRASQSVSSSYLAWYQQKPGQAPRLLIYGASSRATGIPDRFSGSGSGTDFTLTISRLEPEDFAVYYCQQYGSSPLTFGGGTKVEIKSGGGGSEVQLVESGGGLVQPGGSLKLSCAASGFTFNKYAMNWVRQAPGKGLEWVARIRSKYNNYATYYADSVKDRFTISRDDSKNTAYLQMNNLKTEDTAVYYCVRHGNFGNSYISYWAYWGQGTLVTVSSGGGGSGGGGSGGGGSQTVVTQEPSLTVSPGGTVTLTCGSSTGAVTSGNYPNWVQQKPGQAPRGLIGGTKFLAPGTPARFSGSLLGGKAALTLSGVQPEDEAEYYCVLWYSNRWVFGGGTKLTVLGGGGSQRFVTGHFGGLHPANGHHHHHH

SEQ ID NO: 532 - protein, 546 aa, Artificial Sequence
  Synthetic polypeptide
QRFCTGHFGGLHPCNGGGGGSQVQLQESGPGLVKPSQTLSLTCTVSGGSISSGGYYWSWIRQHPGKGLEWIGYIFYSGRTYYNPSLKSRVTISVDTSKNQFSLKLSSVTAADTAVYYCARVYSNYGWFDPWGQGTLVTVSSGGGGSGGGGSGGGGSEIVLTQSPGTLSLSPGERATLSCRASQSVSSSYLAWYQQKPGQAPRLLIYGASSRATGIPDRFSGSGSGTDFTLTISRLEPEDFAVYYCQQYGSSPLTFGGGTKVEIKSGGGGSEVQLVESGGGLVQPGGSLKLSCAASGFTFNKYAMNWVRQAPGKGLEWVARIRSKYNNYATYYADSVKDRFTISRDDSKNTAYLQMNNLKTEDTAVYYCVRHGNFGNSYISYWAYWGQGTLVTVSSGGGGSGGGGSGGGGSQTVVTQEPSLTVSPGGTVTLTCGSSTGAVTSGNYPNWVQQKPGQAPRGLIGGTKFLAPGTPARFSGSLLGGKAALTLSGVQPEDEAEYYCVLWYSNRWVFGGGTKLTVLGGGGSQRFVTGHFGGLHPANGHHHHHH

SEQ ID NO: 533 - protein, 546 aa, Artificial Sequence
  Synthetic polypeptide
QRFCTGHFGGLHPCNGGGGGSQVQLQESGPGLVKPSQTLSLTCTVSGGSISSGGYYWSWIRQHPGKGLEWIGYIFYSGRTYYNPSLKSRVSISVDTSKNQFSLKLSSVTAADTAVYYCARVYSNYGWFDPWGQGTLVTVSSGGGGSGGGGSGGGGSEIVLTQSPGTLSLSPGERATLSCRASQSVSSSYLAWYQQKPGQAPRLLIYGASSRATGIPDRFSGSGSGTDFTLTISRLEPEDFAVYYCQQYGSSPLTFGGGTKVEIKSGGGGSEVQLVESGGGLVQPGGSLKLSCAASGFTFNKYAMNWVRQAPGKGLEWVARIRSKYNNYATYYADSVKDRFTISRDDSKNTAYLQMNNLKTEDTAVYYCVRHGNFGNSYISYWAYWGQGTLVTVSSGGGGSGGGGSGGGGSQTVVTQEPSLTVSPGGTVTLTCGSSTGAVTSGNYPNWVQQKPGQAPRGLIGGTKFLAPGTPARFSGSLLGGKAALTLSGVQPEDEAEYYCVLWYSNRWVFGGGTKLTVLGGGGSQRFVTGHFGGLHPANGHHHHHH

SEQ ID NO: 534 - protein, 546 aa, Artificial Sequence
  Synthetic polypeptide
QRFCTGHFGGLHPCNGGGGGSQVQLQESGPGLVKPSETLSLTCTVSGGSVSSGGYYWSWIRQPPGKGLEWIGYIYYRGRTYYNPSLKSRVTISVDTSKNQFSLKLSSVTAADTAVYYCARVYSNYGWFDPWGQGTLVTVSSGGGGSGGGGSGGGGSEIVLTQSPGTLSLSPGERATLSCRASQSVSSSYLAWYQQKPGQAPRLLIYGASSRATGIPDRFSGSGSGTDFTLTISRLEPEDFAVYYCQQYGSSPLTFGGGTKVEIKSGGGGSEVQLVESGGGLVQPGGSLKLSCAASGFTFNKYAMNWVRQAPGKGLEWVARIRSKYNNYATYYADSVKDRFTISRDDSKNTAYLQMNNLKTEDTAVYYCVRHGNFGNSYISYWAYWGQGTLVTVSSGGGGSGGGGSGGGGSQTVVTQEPSLTVSPGGTVTLTCGSSTGAVTSGNYPNWVQQKPGQAPRGLIGGTKFLAPGTPARFSGSLLGGKAALTLSGVQPEDEAEYYCVLWYSNRWVFGGGTKLTVLGGGGSQRFVTGHFGGLHPANGHHHHHH

SEQ ID NO: 535 - protein, 545 aa, Artificial Sequence
  Synthetic polypeptide
QRFCTGHFGGLHPCNGGGGGSQVQLQESGPGLVKPSQTLSLTCTVSGGSISSGGYYWSWIRQHPGKGLEWIGYIYYRGRTYYNPSLKSRVTISVDTSKNQFSLKLSSVTAADTAVYYCARVYSNYGWFDPWGQGTLVTVSSGGGGSGGGGSGGGGSEIVLTQSPGTLSLSPGERATLSCRASQSVSSSYLAWYQQKPGQAPRLLIYGASSRATGIPDRFSGSGSGTDFTLTISRLEPEDFAVYYCQQYGSSPTFGQGTRLEIKSGGGGSEVQLVESGGGLVQPGGSLKLSCAASGFTFNKYAMNWVRQAPGKGLEWVARIRSKYNNYATYYADSVKDRFTISRDDSKNTAYLQMNNLKTEDTAVYYCVRHGNFGNSYISYWAYWGQGTLVTVSSGGGGSGGGGSGGGGSQTVVTQEPSLTVSPGGTVTLTCGSSTGAVTSGNYPNWVQQKPGQAPRGLIGGTKFLAPGTPARFSGSLLGGKAALTLSGVQPEDEAEYYCVLWYSNRWVFGGGTKLTVLGGGGSQRFVTGHFGGLHPANGHHHHHH

SEQ ID NO: 536 - protein, 546 aa, Artificial Sequence
  Synthetic polypeptide
QRFCTGHFGGLHPCNGGGGGSQVQLQESGPGLVKPSQTLSLTCTVSGGSISSGGYYWSWIRQHPGKGLEWIGYIFYSGKTYYNPSLKSRVSISVDTSKNQFSLKLSSVTAADTAVYYCARVYSNYGWFDPWGQGTLVTVSSGGGGSGGGGSGGGGSEIVLTQSPGTLSLSPGERATLSCRASQSVSSSYLAWYQQKPGQAPRLLIYGASSRATGIPDRFSGSGSGTDFTLTISRLEPEDFAVYYCQQYGSSPITFGQGTRLEIKSGGGGSEVQLVESGGGLVQPGGSLKLSCAASGFTFNKYAMNWVRQAPGKGLEWVARIRSKYNNYATYYADSVKDRFTISRDDSKNTAYLQMNNLKTEDTAVYYCVRHGNFGNSYISYWAYWGQGTLVTVSSGGGGSGGGGSGGGGSQTVVTQEPSLTVSPGGTVTLTCGSSTGAVTSGNYPNWVQQKPGQAPRGLIGGTKFLAPGTPARFSGSLLGGKAALTLSGVQPEDEAEYYCVLWYSNRWVFGGGTKLTVLGGGGSQRFVTGHFGGLHPANGHHHHHH

SEQ ID NO: 537 - protein, 551 aa, Artificial Sequence
  Synthetic polypeptide
QRFCTGHFGGLHPCNGGGGGSQVQLQESGPGLVKPSETLSLTCTVSGGSISSYYWSWIRQPPGKGLEWIGYIYYSGSTNYNPSLKSRVTMSIDTSKNQFSLKLISVTAADTAVYYCARDQRRIVAAGGYYYGMDVWGQGTTVTVSSGGGGSGGGGSGGGGSEIVLTQSPGTLSLSPGERATLSCRASQSVSSSYLAWYQQKPGQAPRLLIYGASTRATGIPARFSGSGSGTDFTLTISRLEPEDFAVYYCQQYGSSPFTFGPGTKVDIKSGGGGSEVQLVESGGGLVQPGGSLKLSCAASGFTFNKYAMNWVRQAPGKGLEWVARIRSKYNNYATYYADSVKDRFTISRDDSKNTAYLQMNNLKTEDTAVYYCVRHGNFGNSYISYWAYWGQGTLVTVSSGGGGSGGGGSGGGGSQTVVTQEPSLTVSPGGTVTLTCGSSTGAVTSGNYPNWVQQKPGQAPRGLIGGTKFLAPGTPARFSGSLLGGKAALTLSGVQPEDEAEYYCVLWYSNRWVFGGGTKLTVLGGGGSQRFVTGHFGGLHPANGHHHHHH

SEQ ID NO: 538 - protein, 545 aa, Artificial Sequence
  Synthetic polypeptide
QRFCTGHFGGLHPCNGGGGGSQVQLQESGPGLVKPSQTLSLTCTVSGGSISSNDYYWSWIRQHPGKGLEWIGYIYYSGSTFYNPSLKSRGAISVDTSKNQFSLKLTSVTAADTAVYYCARGVYRTGAFDIWGQGTMVTVSSGGGGSGGGGSGGGGSDIQMTQSPSSLSASVGDRVTITCRASQSISSYLNWYQQKPGKAPKSLIYAASSLQSGVPSKFSGSGSGTDFTLTISSLQPEDIATYYCQQSYSTPQAFGGGTKVDIKSGGGGSEVQLVESGGGLVQPGGSLKLSCAASGFTFNKYAMNWVRQAPGKGLEWVARIRSKYNNYATYYADSVKDRFTISRDDSKNTAYLQMNNLKTEDTAVYYCVRHGNFGNSYISYWAYWGQGTLVTVSSGGGGSGGGGSGGGGSQTVVTQEPSLTVSPGGTVTLTCGSSTGAVTSGNYPNWVQQKPGQAPRGLIGGTKFLAPGTPARFSGSLLGGKAALTLSGVQPEDEAEYYCVLWYSNRWVFGGGTKLTVLGGGGSQRFVTGHFGGLHPANGHHHHHH

SEQ ID NO: 539 - protein, 546 aa, Artificial Sequence
  Synthetic polypeptide
QRFCTGHFGGLHPCNGGGGGSQVQLVQSGAEVKKPGASVKVSCKASGYTFTYYGISWVRQAPGQGLEWMGWINPYGGETNYAQKLQGRVTMTTDTSTSTAYMELRSLRSDDTAVYYCARGSGGFDYWGQGTLVTVSSGGGGSGGGGSGGGGSDIVMTQTPLSLSVTPGEPASISCRSSQSLLHSNGYNYLDWYLQKPGQSPQLLIYLGSYRASGVPDRFSGSGSGTDFTLKISRVEAEDVGVYYCMQALQTPFTFGPGTKVDIKSGGGGSEVQLVESGGGLVQPGGSLKLSCAASGFTFNKYAMNWVRQAPGKGLEWVARIRSKYNNYATYYADSVKDRFTISRDDSKNTAYLQMNNLKTEDTAVYYCVRHGNFGNSYISYWAYWGQGTLVTVSSGGGGSGGGGSGGGGSQTVVTQEPSLTVSPGGTVTLTCGSSTGAVTSGNYPNWVQQKPGQAPRGLIGGTKFLAPGTPARFSGSLLGGKAALTLSGVQPEDEAEYYCVLWYSNRWVFGGGTKLTVLGGGGSQRFVTGHFGGLHPANGHHHHHH

SEQ ID NO: 540 - protein, 546 aa, Artificial Sequence
  Synthetic polypeptide
QRFCTGHFGGLHPCNGGGGGSQVQLVQSGAEVKKPGASVKVSCKASGYTFTYYGISWVRQAPGQGLEWMGWINPYSGATNYAQKLQGRVTMTTDTSTSTAYMELRSLRSDDTAVYYCARGSGGFDYWGQGTLVTVSSGGGGSGGGGSGGGGSDIVMTQTPLSLSVTPGEPASISCRSSQSLLHSNGYNYLDWYLQKPGQSPQLLIYLGSYRASGVPDRFSGSGSGTDFTLKISRVEAEDVGVYYCMQALQTPFTFGPGTKVDIKSGGGGSEVQLVESGGGLVQPGGSLKLSCAASGFTFNKYAMNWVRQAPGKGLEWVARIRSKYNNYATYYADSVKDRFTISRDDSKNTAYLQMNNLKTEDTAVYYCVRHGNFGNSYISYWAYWGQGTLVTVSSGGGGSGGGGSGGGGSQTVVTQEPSLTVSPGGTVTLTCGSSTGAVTSGNYPNWVQQKPGQAPRGLIGGTKFLAPGTPARFSGSLLGGKAALTLSGVQPEDEAEYYCVLWYSNRWVFGGGTKLTVLGGGGSQRFVTGHFGGLHPANGHHHHHH

SEQ ID NO: 541 - protein, 546 aa, Artificial Sequence
  Synthetic polypeptide
QRFCTGHFGGLHPCNGGGGGSQVQLVQSGAEVKKPGASVKVSCKASGYTFTYYGISWVRQAPGQGLEWMGWINPYTGKTNYAQKLQGRVTMTTDTSTSTAYMELRSLRSDDTAVYYCARGSGGFDYWGQGTLVTVSSGGGGSGGGGSGGGGSDIVMTQTPLSLSVTPGEPASISCRSSQSLLHSNGYNYLDWYLQKPGQSPQLLIYLGSYRASGVPDRFSGSGSGTDFTLKISRVEAEDVGVYYCMQALQTPFTFGPGTKVDIKSGGGGSEVQLVESGGGLVQPGGSLKLSCAASGFTFNKYAMNWVRQAPGKGLEWVARIRSKYNNYATYYADSVKDRFTISRDDSKNTAYLQMNNLKTEDTAVYYCVRHGNFGNSYISYWAYWGQGTLVTVSSGGGGSGGGGSGGGGSQTVVTQEPSLTVSPGGTVTLTCGSSTGAVTSGNYPNWVQQKPGQAPRGLIGGTKFLAPGTPARFSGSLLGGKAALTLSGVQPEDEAEYYCVLWYSNRWVFGGGTKLTVLGGGGSQRFVTGHFGGLHPANGHHHHHH

SEQ ID NO: 542 - protein, 546 aa, Artificial Sequence
  Synthetic polypeptide
QRFCTGHFGGLHPCNGGGGGSQVQLVQSGAEVKKPGASVKVSCKASGYTFTYYGISWVRQAPGQGLEWMGWINPYTGKTNYAQKLQGRVTMTTDTSTSTAYMELRSLRSDDTAVYYCARGSGGFDYWGQGTLVTVSSGGGGSGGGGSGGGGSDIVMTQTPLSLSVTPGEPASISCRSSQSLLHSVGYNYLDWYLQKPGQSPQLLIYLGSYRASGVPDRFSGSGSGTDFTLKISRVEAEDVGVYYCMQALQTPFTFGPGTKVDIKSGGGGSEVQLVESGGGLVQPGGSLKLSCAASGFTFNKYAMNWVRQAPGKGLEWVARIRSKYNNYATYYADSVKDRFTISRDDSKNTAYLQMNNLKTEDTAVYYCVRHGNFGNSYISYWAYWGQGTLVTVSSGGGGSGGGGSGGGGSQTVVTQEPSLTVSPGGTVTLTCGSSTGAVTSGNYPNWVQQKPGQAPRGLIGGTKFLAPGTPARFSGSLLGGKAALTLSGVQPEDEAEYYCVLWYSNRWVFGGGTKLTVLGGGGSQRFVTGHFGGLHPANGHHHHHH

SEQ ID NO: 543 - protein, 546 aa, Artificial Sequence
  Synthetic polypeptide
QRFCTGHFGGLHPCNGGGGGSQVQLVQSGAEVKKPGASVKVSCKASGYTFTSYGISWVRQAPGQGLEWMGWINPYTGNRNYAQKVQDRVTMTTDTSTNTAYMELSSLRSDDTAVYYCARGSGGFDYWGQGTLVTVSSGGGGSGGGGSGGGGSDIVMTQSPLSLPVTLGQPASISCRSSQSLLHSVGYNYLDWYLQKPGQSPQLLIYLGSNRASGVPDRFSGSGSGTDFTLKISRVEAEDVGVYYCMQALQTPFTFGPGTKLEIKSGGGGSEVQLVESGGGLVQPGGSLKLSCAASGFTFNKYAMNWVRQAPGKGLEWVARIRSKYNNYATYYADSVKDRFTISRDDSKNTAYLQMNNLKTEDTAVYYCVRHGNFGNSYISYWAYWGQGTLVTVSSGGGGSGGGGSGGGGSQTVVTQEPSLTVSPGGTVTLTCGSSTGAVTSGNYPNWVQQKPGQAPRGLIGGTKFLAPGTPARFSGSLLGGKAALTLSGVQPEDEAEYYCVLWYSNRWVFGGGTKLTVLGGGGSQRFVTGHFGGLHPANGHHHHHH

SEQ ID NO: 544 - protein, 546 aa, Artificial Sequence
  Synthetic polypeptide
QRFCTGHFGGLHPCNGGGGGSQVQLVQSGAEVKKPGASVKVSCKASGYTFTYYGISWVRQAPGQGLEWMGWINPYTGKTNYAQKLQDRVTMTTDTSTNTAYMELRSLRSDDTAVYYCARGSGGFDYWGQGTLVTVSSGGGGSGGGGSGGGGSDIVMTQTPLSLPVTPGEPASISCRSSQSLLHSVGYNYLDWYLQKPGQSPQLLIYLGSNRASGVPDRFSGSGSGTDFTLKISRVEAEDVGVYYCMQALQTPFTFGPGTKVDIKSGGGGSEVQLVESGGGLVQPGGSLKLSCAASGFTFNKYAMNWVRQAPGKGLEWVARIRSKYNNYATYYADSVKDRFTISRDDSKNTAYLQMNNLKTEDTAVYYCVRHGNFGNSYISYWAYWGQGTLVTVSSGGGGSGGGGSGGGGSQTVVTQEPSLTVSPGGTVTLTCGSSTGAVTSGNYPNWVQQKPGQAPRGLIGGTKFLAPGTPARFSGSLLGGKAALTLSGVQPEDEAEYYCVLWYSNRWVFGGGTKLTVLGGGGSQRFVTGHFGGLHPANGHHHHHH

SEQ ID NO: 545 - protein, 546 aa, Artificial Sequence
  Synthetic polypeptide
QRFCTGHFGGLHPCNGGGGGSQVQLVQSGAEVKKPGASVKVSCKASGYTFTTYGISWVRQAPGQGLEWMGWINPYTGKTNYAQKLQGRVTMATDTSTSTAYMELRSLRSDDTAVYYCARGSGGFDYWGQGTLVTVSSGGGGSGGGGSGGGGSDIVMTQSPLSLPVTPGEPASISCRSSQSLLHSVGYNYLDWYLQKPGQSPQLLIYLGSNRASGVPDRFSGSGSGTDFTLKISRVEAEDVGVYYCMQALQTPFTFGPGTKLEIKSGGGGSEVQLVESGGGLVQPGGSLKLSCAASGFTFNKYAMNWVRQAPGKGLEWVARIRSKYNNYATYYADSVKDRFTISRDDSKNTAYLQMNNLKTEDTAVYYCVRHGNFGNSYISYWAYWGQGTLVTVSSGGGGSGGGGSGGGGSQTVVTQEPSLTVSPGGTVTLTCGSSTGAVTSGNYPNWVQQKPGQAPRGLIGGTKFLAPGTPARFSGSLLGGKAALTLSGVQPEDEAEYYCVLWYSNRWVFGGGTKLTVLGGGGSQRFVTGHFGGLHPANGHHHHHH

SEQ ID NO: 546 - protein, 546 aa, Artificial Sequence
  Synthetic polypeptide
QRFCTGHFGGLHPCNGGGGGSQVQLVQSGAEVKEPGASVKVSCKASGYTFTYYGISWVRQAPGQGLEWMGWINPYTGNRNYAQKVQDRVTMTTDTSTNTAYMELRSLRSDDTAVYYCARGSGGFDYWGQGTLVTVSSGGGGSGGGGSGGGGSDIVMTQSPLSLPVTPGEPASISCRSSQSLLHSVGYNYLDWYLQKPGQSPQLLIYLGSNRASGVPDRFSGSGSGTDFTLKISRVEAEDVGVYYCMQALQTPFTFGPGTKLEIKSGGGGSEVQLVESGGGLVQPGGSLKLSCAASGFTFNKYAMNWVRQAPGKGLEWVARIRSKYNNYATYYADSVKDRFTISRDDSKNTAYLQMNNLKTEDTAVYYCVRHGNFGNSYISYWAYWGQGTLVTVSSGGGGSGGGGSGGGGSQTVVTQEPSLTVSPGGTVTLTCGSSTGAVTSGNYPNWVQQKPGQAPRGLIGGTKFLAPGTPARFSGSLLGGKAALTLSGVQPEDEAEYYCVLWYSNRWVFGGGTKLTVLGGGGSQRFVTGHFGGLHPANGHHHHHH

SEQ ID NO: 547 - protein, 546 aa, Artificial Sequence
  Synthetic polypeptide
QRFCTGHFGGLHPCNGGGGGSQVQLVQSGAEVKKPGASVKVSCKASGYTFTYYGISWVRQAPGQGLEWMGWINPYTGKTNYAQKLQGRVTMTTDTSTSTAYMELRSLRSDDTAVYYCARGSGGFDYWGQGTLVTVSSGGGGSGGGGSGGGGSDIVMTQSPLSLPVTPGEPASISCRSSQSLLHSVGYNYLDWYLQKPGQSPQLLIYLGSNRASGVPDRFSGSGSGTDFTLKISRVEAEDVGVYYCMQALQTPFTFGPGTKVEIKSGGGGSEVQLVESGGGLVQPGGSLKLSCAASGFTFNKYAMNWVRQAPGKGLEWVARIRSKYNNYATYYADSVKDRFTISRDDSKNTAYLQMNNLKTEDTAVYYCVRHGNFGNSYISYWAYWGQGTLVTVSSGGGGSGGGGSGGGGSQTVVTQEPSLTVSPGGTVTLTCGSSTGAVTSGNYPNWVQQKPGQAPRGLIGGTKFLAPGTPARFSGSLLGGKAALTLSGVQPEDEAEYYCVLWYSNRWVFGGGTKLTVLGGGGSQRFVTGHFGGLHPANGHHHHHH

SEQ ID NO: 548 - protein, 546 aa, Artificial Sequence
  Synthetic polypeptide
QRFCTGHFGGLHPCNGGGGGSQVQLVQSGAEVKKPGASVKVSCKASGYTFTSYGITWVRQAPGQGLEWMGWINPYTGNRNYAQKVQGRVTMTTDTSTSTAYMELRSLRSDDTAVYYCARGSGGFDYWGQGTLVTVSSGGGGSGGGGSGGGGSDIVMTQSPLSLSVTPGEPASISCRSSQSLLHSVGYNYLDWYLQKPGQSPQLLIYLGSNRASGVPDRFSGSGSGTDFTLKISRVEAEDVGVYYCMQALQTPFTFGPGTKVDIKSGGGGSEVQLVESGGGLVQPGGSLKLSCAASGFTFNKYAMNWVRQAPGKGLEWVARIRSKYNNYATYYADSVKDRFTISRDDSKNTAYLQMNNLKTEDTAVYYCVRHGNFGNSYISYWAYWGQGTLVTVSSGGGGSGGGGSGGGGSQTVVTQEPSLTVSPGGTVTLTCGSSTGAVTSGNYPNWVQQKPGQAPRGLIGGTKFLAPGTPARFSGSLLGGKAALTLSGVQPEDEAEYYCVLWYSNRWVFGGGTKLTVLGGGGSQRFVTGHFGGLHPANGHHHHHH

SEQ ID NO: 549 - protein, 546 aa, Artificial Sequence
  Synthetic polypeptide
QRFCTGHFGGLHPCNGGGGGSQVQLVQSGAEVKKPGASVKVSCKASGYTFTSYGISWVRQAPGQGLEWMGWINPYTGNRNYAQKFQGRVTMTTDTSTNTAYMELSSLRSEDTAVYYCARGSGGFDYWGQGTLVTVSSGGGGSGGGGSGGGGSDIVMTQSPLSLPVTPGEPASISCRSSQSLLHSVGYNYLDWYLQKPGQSPQLLIYLGSNRASGVPDRFSGSGSGTDFTLKISRVEAEDVGVYYCMQALQTPFTFGPGTKVDIKSGGGGSEVQLVESGGGLVQPGGSLKLSCAASGFTFNKYAMNWVRQAPGKGLEWVARIRSKYNNYATYYADSVKDRFTISRDDSKNTAYLQMNNLKTEDTAVYYCVRHGNFGNSYISYWAYWGQGTLVTVSSGGGGSGGGGSGGGGSQTVVTQEPSLTVSPGGTVTLTCGSSTGAVTSGNYPNWVQQKPGQAPRGLIGGTKFLAPGTPARFSGSLLGGKAALTLSGVQPEDEAEYYCVLWYSNRWVFGGGTKLTVLGGGGSQRFVTGHFGGLHPANGHHHHHH

SEQ ID NO: 550 - protein, 546 aa, Artificial Sequence
  Synthetic polypeptide
QRFCTGHFGGLHPCNGGGGGSQVQLVQSGAEVKKPGASVKVSCKASGYSFTSYGISWVRQAPGQGLEWMGWINPYTGNRNYAQKVQGRVTMTTDTSTSTAYMELRSLRSDDTAVYYCARGSGGFDYWGQGTLVTVSSGGGGSGGGGSGGGGSDIVMTQSPLSLPVTPGEPASISCRSSQSLLHSVGYNYLDWYLQKPGQSPQLLIYLGSNRASGVPDRFSGSGSGTDFTLKISRVEAEDVGVYYCMQALQTPFTFGPGTKVEIKSGGGGSEVQLVESGGGLVQPGGSLKLSCAASGFTFNKYAMNWVRQAPGKGLEWVARIRSKYNNYATYYADSVKDRFTISRDDSKNTAYLQMNNLKTEDTAVYYCVRHGNFGNSYISYWAYWGQGTLVTVSSGGGGSGGGGSGGGGSQTVVTQEPSLTVSPGGTVTLTCGSSTGAVTSGNYPNWVQQKPGQAPRGLIGGTKFLAPGTPARFSGSLLGGKAALTLSGVQPEDEAEYYCVLWYSNRWVFGGGTKLTVLGGGGSQRFVTGHFGGLHPANGHHHHHH

SEQ ID NO: 551 - protein, 546 aa, Artificial Sequence
  Synthetic polypeptide
QRFCTGHFGGLHPCNGGGGGSQVQLVQSGAEVKKPGASVKVSCKASGYTFTYYGISWVRQAPGQGLEWMGWINPYTGKTNYAQKVQGRVTMTTDTSTSTAYMELRNLRSDDTAVYYCARGSGGFDYWGQGTLVTVSSGGGGSGGGGSGGGGSDIVMTQTPLSLSVTPGQPASISCRSSQSLLHSVGYNYLDWYLQKPGQSPQLLIYLGSNRASGVPDRFSGSGSGTDFTLKISRVEAEDVGVYYCMQALQTPFTFGPGTKVDIKSGGGGSEVQLVESGGGLVQPGGSLKLSCAASGFTFNKYAMNWVRQAPGKGLEWVARIRSKYNNYATYYADSVKDRFTISRDDSKNTAYLQMNNLKTEDTAVYYCVRHGNFGNSYISYWAYWGQGTLVTVSSGGGGSGGGGSGGGGSQTVVTQEPSLTVSPGGTVTLTCGSSTGAVTSGNYPNWVQQKPGQAPRGLIGGTKFLAPGTPARFSGSLLGGKAALTLSGVQPEDEAEYYCVLWYSNRWVFGGGTKLTVLGGGGSQRFVTGHFGGLHPANGHHHHHH

SEQ ID NO: 552 - protein, 546 aa, Artificial Sequence
  Synthetic polypeptide
QRFCTGHFGGLHPCNGGGGGSQVQLVQSGAEVKKPGASVKVSCKASGYTFTYYGISWVRQAPGQGLEWMGWINPYTGKTNYAQKLQGRVTMTTDTSTSTAYMELRSLRSDDTAVYYCARGSGGFDYWGQGTLVTVSSGGGGSGGGGSGGGGSDIVMTQTPLSLSVTPGQPASISCRSSQSLLHSVGYNYLDWYLQKPGQSPQLLIYLGSNRASGVPDRFSGSGSGTDFTLKISRVEAEDVGVYYCMQALQTPFTFGPGTKVDIKSGGGGSEVQLVESGGGLVQPGGSLKLSCAASGFTFNKYAMNWVRQAPGKGLEWVARIRSKYNNYATYYADSVKDRFTISRDDSKNTAYLQMNNLKTEDTAVYYCVRHGNFGNSYISYWAYWGQGTLVTVSSGGGGSGGGGSGGGGSQTVVTQEPSLTVSPGGTVTLTCGSSTGAVTSGNYPNWVQQKPGQAPRGLIGGTKFLAPGTPARFSGSLLGGKAALTLSGVQPEDEAEYYCVLWYSNRWVFGGGTKLTVLGGGGSQRFVTGHFGGLHPANGHHHHHH

SEQ ID NO: 553 - protein, 550 aa, Artificial Sequence
  Synthetic polypeptide
QRFCTGHFGGLHPCNGGGGGSQVQLVESGGGVVQPGRSLRLSCAASGFTFRNYAMHWVRQAPGKGLEWVAVISYSGNNKYYASSVKGRFTISRDNSKNTLYLQLNSLRAEDTAVYYCAREFYYDSTGYDYSTPGDYWGQGTLVTVSSGGGGSGGGGSGGGGSDIQMTQSPSSLSASVGDRVTITCQASQDISNYLNWYQQKPGKAPKLLIYDASNLETGVPSRFSGSGSGTDFTFTISSLQPEDIATYYCQQYDNLPTFGQGTRLEIKSGGGGSEVQLVESGGGLVQPGGSLKLSCAASGFTFNKYAMNWVRQAPGKGLEWVARIRSKYNNYATYYADSVKDRFTISRDDSKNTAYLQMNNLKTEDTAVYYCVRHGNFGNSYISYWAYWGQGTLVTVSSGGGGSGGGGSGGGGSQTVVTQEPSLTVSPGGTVTLTCGSSTGAVTSGNYPNWVQQKPGQAPRGLIGGTKFLAPGTPARFSGSLLGGKAALTLSGVQPEDEAEYYCVLWYSNRWVFGGGTKLTVLGGGGSQRFVTGHFGGLHPANGHHHHHH

SEQ ID NO: 554 - protein, 551 aa, Artificial Sequence
  Synthetic polypeptide
QRFCTGHFGGLHPCNGGGGGSQVQLVESGGGVVQPGRSLRLSCVASGFTFRNYAMHWVRQAPGKGLEWVAVISYSGNNKYYASSVKGRFTISRDNSKNTLYLQLNSLRAEDTAVYYCAREFYYDSTGYDYSTPGDYWGQGTLVTVSSGGGGSGGGGSGGGGSDIQMTQSPSSLSASVGDRVTITCRASQSISSYLNWYQQKPGKAPKLLIYDASSLQSGVPSRFSGSGSGTEFTLTISSLQAEDVAVYYCQQYYSTPLTFGGGTKVDIKSGGGGSEVQLVESGGGLVQPGGSLKLSCAASGFTFNKYAMNWVRQAPGKGLEWVARIRSKYNNYATYYADSVKDRFTISRDDSKNTAYLQMNNLKTEDTAVYYCVRHGNFGNSYISYWAYWGQGTLVTVSSGGGGSGGGGSGGGGSQTVVTQEPSLTVSPGGTVTLTCGSSTGAVTSGNYPNWVQQKPGQAPRGLIGGTKFLAPGTPARFSGSLLGGKAALTLSGVQPEDEAEYYCVLWYSNRWVFGGGTKLTVLGGGGSQRFVTGHFGGLHPANGHHHHHH

SEQ ID NO: 555 - protein, 551 aa, Artificial Sequence
  Synthetic polypeptide
QRFCTGHFGGLHPCNGGGGGSQVQLVESGGGVVQPGRSLRLSCAASGFTFRNYAMHWVRQAPGKGLEWVAGISYSGTNKYYASSVKGRFTISRDNSKNTLYLQLNSLRAEDTAVYYCAREFYYDSTGYDYSTPGDYWGQGTLVTVSSGGGGSGGGGSGGGGSDIQMTQSPSSLSASVGDRVTITCQASQDISNYLNWYQQKPGKAPKLLIYDASNLETGVPSRFSGSGSGTEFTLTISSLQPEDIATYYCQQYDNLPLTFGGGTKVDIKSGGGGSEVQLVESGGGLVQPGGSLKLSCAASGFTFNKYAMNWVRQAPGKGLEWVARIRSKYNNYATYYADSVKDRFTISRDDSKNTAYLQMNNLKTEDTAVYYCVRHGNFGNSYISYWAYWGQGTLVTVSSGGGGSGGGGSGGGGSQTVVTQEPSLTVSPGGTVTLTCGSSTGAVTSGNYPNWVQQKPGQAPRGLIGGTKFLAPGTPARFSGSLLGGKAALTLSGVQPEDEAEYYCVLWYSNRWVFGGGTKLTVLGGGGSQRFVTGHFGGLHPANGHHHHHH

SEQ ID NO: 556 - protein, 551 aa, Artificial Sequence
  Synthetic polypeptide
QRFCTGHFGGLHPCNGGGGGSQVQLVESGGGVVQPGRSLRLSCVASGFTFRNYAMHWVRQAPGKGLEWVAVISYSGNNKYYASSVKGRFTISRDNSKNTLFLQLNSLRAEDTAVYYCAREFYYDSTGYDYSTPGNYWGQGTLVTVSSGGGGSGGGGSGGGGSDIQMTQSPSSLSASVGDRVTITCQASQDISNYLNWYQQKPGKAPKLLIYDASNLETGVPSRFSGSGSGTDFTFTISSLQPEDIATYYCQQYVNLPLTFGGGTKLEIKSGGGGSEVQLVESGGGLVQPGGSLKLSCAASGFTFNKYAMNWVRQAPGKGLEWVARIRSKYNNYATYYADSVKDRFTISRDDSKNTAYLQMNNLKTEDTAVYYCVRHGNFGNSYISYWAYWGQGTLVTVSSGGGGSGGGGSGGGGSQTVVTQEPSLTVSPGGTVTLTCGSSTGAVTSGNYPNWVQQKPGQAPRGLIGGTKFLAPGTPARFSGSLLGGKAALTLSGVQPEDEAEYYCVLWYSNRWVFGGGTKLTVLGGGGSQRFVTGHFGGLHPANGHHHHHH

SEQ ID NO: 557 - protein, 548 aa, Artificial Sequence
  Synthetic polypeptide
QRFCTGHFGGLHPCNGGGGGSQVQLVESGGGVVQPGRSLRLSCAASGFTFSSYGMQWVRQAPGKGLEWVAVIWYSGSNKYYASSVKGRFTISRDNSKNTLYLQMNSLRAEDTAVYYCARDGYPIFYRYYGMDVWGQGTTVTVSSGGGGSGGGGSGGGGSDIQMTQSPSSLSASVGDRVTITCRASQGISNYLAWYQQKPGKVPKLLIYAASTLQSGVPSRFSGSGSGTDFTLTISSLQPEDVATYYCQKYNSAPLTFGGGTKVEIKSGGGGSEVQLVESGGGLVQPGGSLKLSCAASGFTFNKYAMNWVRQAPGKGLEWVARIRSKYNNYATYYADSVKDRFTISRDDSKNTAYLQMNNLKTEDTAVYYCVRHGNFGNSYISYWAYWGQGTLVTVSSGGGGSGGGGSGGGGSQTVVTQEPSLTVSPGGTVTLTCGSSTGAVTSGNYPNWVQQKPGQAPRGLIGGTKFLAPGTPARFSGSLLGGKAALTLSGVQPEDEAEYYCVLWYSNRWVFGGGTKLTVLGGGGSQRFVTGHFGGLHPANGHHHHHH

SEQ ID NO: 558 - protein, 549 aa, Artificial Sequence
  Synthetic polypeptide
QRFCTGHFGGLHPCNGGGGGSQVQLVESGGGVVQPGRSLRLSCAASGFTFSSYGMHWVRQAPGKGLEWVAVISYSGSNKYYASSVKGRFTISRDNSKNTLYLQMNSLRAEDTAVYYCARDGYPIFYRYYGMDVWGQGTTVTVSSGGGGSGGGGSGGGGSEIVLTQSPGTLSLSPGERATLSCRASQSVSSSYLAWYQQKPGQAPRLLIYGASSRATGIPDRFSGSGSGTDFTLTISRLEPEDLAVYYCQQYGTSPLTFGGGTKLEIKSGGGGSEVQLVESGGGLVQPGGSLKLSCAASGFTFNKYAMNWVRQAPGKGLEWVARIRSKYNNYATYYADSVKDRFTISRDDSKNTAYLQMNNLKTEDTAVYYCVRHGNFGNSYISYWAYWGQGTLVTVSSGGGGSGGGGSGGGGSQTVVTQEPSLTVSPGGTVTLTCGSSTGAVTSGNYPNWVQQKPGQAPRGLIGGTKFLAPGTPARFSGSLLGGKAALTLSGVQPEDEAEYYCVLWYSNRWVFGGGTKLTVLGGGGSQRFVTGHFGGLHPANGHHHHHH

SEQ ID NO: 559 - protein, 549 aa, Artificial Sequence
  Synthetic polypeptide
QRFCTGHFGGLHPCNGGGGGSQVQLVESGGGVVQPGRSLRLSCAASGFTFSSFGMHWVRQAPGKGLEWVAFIWYSGSNKYYASSVKGRVTISRDNSKNTLYLQMNSLRAEDTAVYYCARDGYPIFYYYYGMDVWGQGTTVTVSSGGGGSGGGGSGGGGSEIVLTQSPGTLSLSPGERATLSCRASQSVSSSYLAWYQQKPGQAPRLLIYGASSRATGIPDRFSGSGSGTDFTLTISRLEPEDFAVYYCQQYGSSPFTFGPGTRLEIKSGGGGSEVQLVESGGGLVQPGGSLKLSCAASGFTFNKYAMNWVRQAPGKGLEWVARIRSKYNNYATYYADSVKDRFTISRDDSKNTAYLQMNNLKTEDTAVYYCVRHGNFGNSYISYWAYWGQGTLVTVSSGGGGSGGGGSGGGGSQTVVTQEPSLTVSPGGTVTLTCGSSTGAVTSGNYPNWVQQKPGQAPRGLIGGTKFLAPGTPARFSGSLLGGKAALTLSGVQPEDEAEYYCVLWYSNRWVFGGGTKLTVLGGGGSQRFVTGHFGGLHPANGHHHHHH

SEQ ID NO: 560 - protein, 549 aa, Artificial Sequence
  Synthetic polypeptide
QRFCTGHFGGLHPCNGGGGGSQVQLVESGGGVVQPGGSLRLSCAASGFTFSSYGMHWVRQAPGKGLEWVAFIWYDGSNKYYADSVKGRFTISRDNSKNTLYLQMNSLRAEDTAVYYCARRAGIIGTIGYYYGMDVWGQGTTVTVSSGGGGSGGGGSGGGGSSYELTQPPSVSVSPGQTASITCSGDRLGEKYTSWYQQRPGQSPLLVIYQDTKRPSGIPERFSGSNSGNTATLTISGTQAMDEADYYCQAWESSTVVFGGGTKLTVLSGGGGSEVQLVESGGGLVQPGGSLKLSCAASGFTFNKYAMNWVRQAPGKGLEWVARIRSKYNNYATYYADSVKDRFTISRDDSKNTAYLQMNNLKTEDTAVYYCVRHGNFGNSYISYWAYWGQGTLVTVSSGGGGSGGGGSGGGGSQTVVTQEPSLTVSPGGTVTLTCGSSTGAVTSGNYPNWVQQKPGQAPRGLIGGTKFLAPGTPARFSGSLLGGKAALTLSGVQPEDEAEYYCVLWYSNRWVFGGGTKLTVLGGGGSQRFVTGHFGGLYPANGHHHHHH

SEQ ID NO: 561 - protein, 546 aa, Artificial Sequence
  Synthetic polypeptide
QRFCTGHFGGLHPCNGGGGGSQVQLQESGPGLVKPSQTLSLTCTVSGGSISRGGYYWSWIRQHPGKGLEWIGYIFYRGRTYYNPSLKSRVTISVDTSKNQFSLKLSSVTAADTAVYYCARVNSNYGWFDPWGQGTLVTVSSGGGGSGGGGSGGGGSEIVLTQFPGTLSLSPGERATLSCRASQSVSSSYLAWYQQKPGQAPRLLIYGASSRATGIPDRFSGSGSGTDFTLTISRLEPEDFAVYYCQQYGSSPLTFGGGTKLEIKSGGGGSEVQLVESGGGLVQPGGSLKLSCAASGFTFNKYAMNWVRQAPGKGLEWVARIRSKYNNYATYYADSVKDRFTISRDDSKNTAYLQMNNLKTEDTAVYYCVRHGNFGNSYISYWAYWGQGTLVTVSSGGGGSGGGGSGGGGSQTVVTQEPSLTVSPGGTVTLTCGSSTGAVTSGNYPNWVQQKPGQAPRGLIGGTKFLAPGTPARFSGSLLGGKAALTLSGVQPEDEAEYYCVLWYSNRWVFGGGTKLTVLGGGGSQRFVTGHFGGLYPANGHHHHHH

SEQ ID NO: 562 - protein, 546 aa, Artificial Sequence
  Synthetic polypeptide
QRFCTGHFGGLHPCNGGGGGSQVQLQESGPGLVKPSQTLSLTCTVSGGSISSGGYYWSWIRQHPGKGLEWIGYIFYRGRTYYNPSLKSRVTISVDTSKNQFSLKLSSVTAADTAVYYCARVYSNYGWFDPWGQGTLVTVSSGGGGSGGGGSGGGGSEIVLTQSPGTLSLSPGERATLSCRASQSVSSSYLAWYQQKPGQAPRLLIYGTSNRATGIPDRFSGSGSGTDFTLTISRLEPEDFAVYYCQQYGSSPLTFGGGTKLEIKSGGGGSEVQLVESGGGLVQPGGSLKLSCAASGFTFNKYAMNWVRQAPGKGLEWVARIRSKYNNYATYYADSVKDRFTISRDDSKNTAYLQMNNLKTEDTAVYYCVRHGNFGNSYISYWAYWGQGTLVTVSSGGGGSGGGGSGGGGSQTVVTQEPSLTVSPGGTVTLTCGSSTGAVTSGNYPNWVQQKPGQAPRGLIGGTKFLAPGTPARFSGSLLGGKAALTLSGVQPEDEAEYYCVLWYSNRWVFGGGTKLTVLGGGGSQRFVTGHFGGLYPANGHHHHHH

SEQ ID NO: 563 - protein, 546 aa, Artificial Sequence
  Synthetic polypeptide
QRFCTGHFGGLHPCNGGGGGSQVQLQESGPGLVKPSQTLSLTCTVSGGSISSGGYYWSWIRQHPGKGLEWIGYIFYSGRTYYNPSLKSRVTISVDTSKNQFSLKLSSVTAADTAVYYCARVYSNYGWFDPWGQGTLVTVSSGGGGSGGGGSGGGGSEIVLTQSPGTLSLSPGERATLSCRASQSVSSSYLAWYQQKPGQAPRLLIYGASSRATGIPDRFSGSGSGTDFTLTISRLEPEDFAVYYCQQYGSSPLTFGGGTKLEIKSGGGGSEVQLVESGGGLVQPGGSLKLSCAASGFTFNKYAMNWVRQAPGKGLEWVARIRSKYNNYATYYADSVKDRFTISRDDSKNTAYLQMNNLKTEDTAVYYCVRHGNFGNSYISYWAYWGQGTLVTVSSGGGGSGGGGSGGGGSQTVVTQEPSLTVSPGGTVTLTCGSSTGAVTSGNYPNWVQQKPGQAPRGLIGGTKFLAPGTPARFSGSLLGGKAALTLSGVQPEDEAEYYCVLWYSNRWVFGGGTKLTVLGGGGSQRFVTGHFGGLYPANGHHHHHH

SEQ ID NO: 564 - protein, 546 aa, Artificial Sequence
  Synthetic polypeptide
QRFCTGHFGGLHPCNGGGGGSQVQLQESGPGLVKPSQTLSLTCTVSGGSISSGGYYWSWIRQHPGKGLEWIGYIFYSGRTYYNPSLKSRVTISVDTSKNQFSLKLRSVTAADTAVYYCARVYSNYGWFDPWGQGTLVTVSSGGGGSGGGGSGGGGSEIVLTQSPGTLSLSPGERATLSCRASQSVSSSYLAWYQQKPGQAPRLLIYGASSRATGIPDRFSGSGSGTDFTLTISRLEPEDFAVYYCQQYGSSPLTFGGGTKLEIKSGGGGSEVQLVESGGGLVQPGGSLKLSCAASGFTFNKYAMNWVRQAPGKGLEWVARIRSKYNNYATYYADSVKDRFTISRDDSKNTAYLQMNNLKTEDTAVYYCVRHGNFGNSYISYWAYWGQGTLVTVSSGGGGSGGGGSGGGGSQTVVTQEPSLTVSPGGTVTLTCGSSTGAVTSGNYPNWVQQKPGQAPRGLIGGTKFLAPGTPARFSGSLLGGKAALTLSGVQPEDEAEYYCVLWYSNRWVFGGGTKLTVLGGGGSQRFVTGHFGGLYPANGHHHHHH

SEQ ID NO: 565 - protein, 546 aa, Artificial Sequence
  Synthetic polypeptide
QRFCTGHFGGLHPCNGGGGGSQVQLQESGPGLVKPSQTLSLTCTVSGGSISSGGYYWSWIRQHPGKGLEWIGYIYYSGSTFYNPSLRSRVTISVDTSKNQFSLKLSSVTAADTAVYYCARDSSSSRALDYWGQGTLVTVSSGGGGSGGGGSGGGGSEIVLTQSPGTLSLSPGERATLSCRASQSVSSSYLAWYQQKPGQAPRLLIYGASSRATGIPDRFSGSGSGTDFTLTISRLEPEDFAVYYCQQYDSSPRTFGQGTKLEIKSGGGGSEVQLVESGGGLVQPGGSLKLSCAASGFTFNKYAMNWVRQAPGKGLEWVARIRSKYNNYATYYADSVKDRFTISRDDSKNTAYLQMNNLKTEDTAVYYCVRHGNFGNSYISYWAYWGQGTLVTVSSGGGGSGGGGSGGGGSQTVVTQEPSLTVSPGGTVTLTCGSSTGAVTSGNYPNWVQQKPGQAPRGLIGGTKFLAPGTPARFSGSLLGGKAALTLSGVQPEDEAEYYCVLWYSNRWVFGGGTKLTVLGGGGSQRFVTGHFGGLYPANGHHHHHH

SEQ ID NO: 566 - protein, 546 aa, Artificial Sequence
  Synthetic polypeptide
QRFCTGHFGGLHPCNGGGGGSQVQLQESGPGLVKPSQTLSLTCTVSGGSISSGGYYWSWIRQHPGKGLEWIGYIYYRGRTYYNPSLKSRVTISVDTSKNQFSLKLSSVTAADTAVYYCARVYSNYGWFDPWGQGTLVTVSSGGGGSGGGGSGGGGSEIVLTQSPGTLSLSPGERATLSCRASQSVSSSYLAWYQQKPGQAPRLLIYGASSRATGIPDRFSGSGSGTDFTLTISRLEPEDFAVYYCQQYGSSPLTFGGGTKLEIKSGGGGSEVQLVESGGGLVQPGGSLKLSCAASGFTFNKYAMNWVRQAPGKGLEWVARIRSKYNNYATYYADSVKDRFTISRDDSKNTAYLQMNNLKTEDTAVYYCVRHGNFGNSYISYWAYWGQGTLVTVSSGGGGSGGGGSGGGGSQTVVTQEPSLTVSPGGTVTLTCGSSTGAVTSGNYPNWVQQKPGQAPRGLIGGTKFLAPGTPARFSGSLLGGKAALTLSGVQPEDEAEYYCVLWYSNRWVFGGGTKLTVLGGGGSQRFVTGHFGGLYPANGHHHHHH

SEQ ID NO: 567 - protein, 545 aa, Artificial Sequence
  Synthetic polypeptide
QRFCTGHFGGLHPCNGGGGGSQVQLQESGPGLVKPSETLSLTCTVSGGSISSGGYYWSWIRQHPGKGLEWIGYIFYRGRTYYNPSLKSRVTISVDTSKNQFSLKLSSVTAADTAVYYCARVYSNYGWFDPWGQGTLVTVSSGGGGSGGGGSGGGGSEIVLTQSPGTLSLSPGERATLSCRASQSVSSSYLAWYQQKPGQAPRLLIYGASSRATGIPDRFSGSGSGTDFTLTISRLEPEDFAVYYCQQYGSSPTFGGGTKVEIKSGGGGSEVQLVESGGGLVQPGGSLKLSCAASGFTFNKYAMNWVRQAPGKGLEWVARIRSKYNNYATYYADSVKDRFTISRDDSKNTAYLQMNNLKTEDTAVYYCVRHGNFGNSYISYWAYWGQGTLVTVSSGGGGSGGGGSGGGGSQTVVTQEPSLTVSPGGTVTLTCGSSTGAVTSGNYPNWVQQKPGQAPRGLIGGTKFLAPGTPARFSGSLLGGKAALTLSGVQPEDEAEYYCVLWYSNRWVFGGGTKLTVLGGGGSQRFVTGHFGGLYPANGHHHHHH

SEQ ID NO: 568 - protein, 546 aa, Artificial Sequence
  Synthetic polypeptide
QRFCTGHFGGLHPCNGGGGGSQVQLQESGPGLVKPSQTLSLTCTVSGGSISSGGYYWSWIRQHPGKGLEWIGYIFYRGRTYYNPSLKSRVTISVDTSKNQFSLKLSSVTAADTAVYYCARVYSNYGWFDPWGQGTLVTVSSGGGGSGGGGSGGGGSEIVLTQSPGTLSLSPGERATLSCRASQSVSSSYLAWYQQKPGQAPRLLIYGASSRATGIPDRFSGSGSGTDFTLTISRLEPEDFAVYYCQQYGSSPLTFGGGTKVEIKSGGGGSEVQLVESGGGLVQPGGSLKLSCAASGFTFNKYAMNWVRQAPGKGLEWVARIRSKYNNYATYYADSVKDRFTISRDDSKNTAYLQMNNLKTEDTAVYYCVRHGNFGNSYISYWAYWGQGTLVTVSSGGGGSGGGGSGGGGSQTVVTQEPSLTVSPGGTVTLTCGSSTGAVTSGNYPNWVQQKPGQAPRGLIGGTKFLAPGTPARFSGSLLGGKAALTLSGVQPEDEAEYYCVLWYSNRWVFGGGTKLTVLGGGGSQRFVTGHFGGLYPANGHHHHHH

SEQ ID NO: 569 - protein, 545 aa, Artificial Sequence
  Synthetic polypeptide
QRFCTGHFGGLHPCNGGGGGSQVQLQESGPGLVKPSQTLSLTCTVSGGSISSGGYYWSWIRQHPGKGLEWIGYIYYRGRTYYNPSLKSRVTISVDTSKNQFSLKLSSVTAADTAVYYCARVYSNYGWFDPWGQGTLVTVSSGGGGSGGGGSGGGGSEIVLTQSPGTLSLSPGERATLSCRASQSVSSSYLAWYQQKPGQAPRLLIYGASSRATGIPDRFSGSGSGTDFTLTISRLEPEDFAVYYCQQYGSSPTFGPGTKVEIKSGGGGSEVQLVESGGGLVQPGGSLKLSCAASGFTFNKYAMNWVRQAPGKGLEWVARIRSKYNNYATYYADSVKDRFTISRDDSKNTAYLQMNNLKTEDTAVYYCVRHGNFGNSYISYWAYWGQGTLVTVSSGGGGSGGGGSGGGGSQTVVTQEPSLTVSPGGTVTLTCGSSTGAVTSGNYPNWVQQKPGQAPRGLIGGTKFLAPGTPARFSGSLLGGKAALTLSGVQPEDEAEYYCVLWYSNRWVFGGGTKLTVLGGGGSQRFVTGHFGGLYPANGHHHHHH

SEQ ID NO: 570 - protein, 545 aa, Artificial Sequence
  Synthetic polypeptide
QRFCTGHFGGLHPCNGGGGGSQVQLQESGPGLVKPSQTLSLTCTVSGGSISSGGYYWSWIRQHPGKGLEWIGYIYYRGRTYYNPSLKSRVTISVDTSKNQFSLKLSSVTAADTAVYYCARVYSNYGWFDPWGQGTLVTVSSGGGGSGGGGSGGGGSEIVLTQSPGTLSLSPGERATLSCRASQSVSSSYLAWYQQKPGQAPRLLIYGASSRATGIPDRFSGSGSGTDFTLTISRLEPEDFAVYYCQQYGSSPTFGGGTKVEIKSGGGGSEVQLVESGGGLVQPGGSLKLSCAASGFTFNKYAMNWVRQAPGKGLEWVARIRSKYNNYATYYADSVKDRFTISRDDSKNTAYLQMNNLKTEDTAVYYCVRHGNFGNSYISYWAYWGQGTLVTVSSGGGGSGGGGSGGGGSQTVVTQEPSLTVSPGGTVTLTCGSSTGAVTSGNYPNWVQQKPGQAPRGLIGGTKFLAPGTPARFSGSLLGGKAALTLSGVQPEDEAEYYCVLWYSNRWVFGGGTKLTVLGGGGSQRFVTGHFGGLYPANGHHHHHH

SEQ ID NO: 571 - protein, 545 aa, Artificial Sequence
  Synthetic polypeptide
QRFCTGHFGGLHPCNGGGGGSQVQLQESGPGLVKPSQTLSLTCTISGGSISSGGYYWSWIRQHPGKGLEWIGYIFYSGRTYYNPSLKSRVTISVDTSKNQFSLKLTSVTAADTAVYYCARVNSNYGWFDPWGQGTLVTVSSGGGGSGGGGSGGGGSEIVLTQSPGTLSLSPGERATLSCRASQSVSSSYLAWYQQKPGQAPRLLIYGASSRATGIPDRFSGSGSGTDFTLTISRLEPEDFAVYYCQQYGSSPTFGGGTKVEIKSGGGGSEVQLVESGGGLVQPGGSLKLSCAASGFTFNKYAMNWVRQAPGKGLEWVARIRSKYNNYATYYADSVKDRFTISRDDSKNTAYLQMNNLKTEDTAVYYCVRHGNFGNSYISYWAYWGQGTLVTVSSGGGGSGGGGSGGGGSQTVVTQEPSLTVSPGGTVTLTCGSSTGAVTSGNYPNWVQQKPGQAPRGLIGGTKFLAPGTPARFSGSLLGGKAALTLSGVQPEDEAEYYCVLWYSNRWVFGGGTKLTVLGGGGSQRFVTGHFGGLYPANGHHHHHH

SEQ ID NO: 572 - protein, 546 aa, Artificial Sequence
  Synthetic polypeptide
QRFCTGHFGGLHPCNGGGGGSQVQLQESGPGLVKPSQTLSLTCTVSGGSISSGGYYWSWIRQHPGKGLDWIGYIFYRGRTYYNPSLKSRVTISVDTSKNQFSLKLSSVTAADTAVYYCARVNSNYGWFDPWGQGTLVTVSSGGGGSGGGGSGGGGSEIVLTQSPGTLSLSPGERATLSCRASQSVSSSYLAWYQQKPGQAPRLLIYGASSRATGIPDRFSGSGSGTDFTLTISRLEPEDFAVYYCQQYGSSPLTFGGGTKVEIKSGGGGSEVQLVESGGGLVQPGGSLKLSCAASGFTFNKYAMNWVRQAPGKGLEWVARIRSKYNNYATYYADSVKDRFTISRDDSKNTAYLQMNNLKTEDTAVYYCVRHGNFGNSYISYWAYWGQGTLVTVSSGGGGSGGGGSGGGGSQTVVTQEPSLTVSPGGTVTLTCGSSTGAVTSGNYPNWVQQKPGQAPRGLIGGTKFLAPGTPARFSGSLLGGKAALTLSGVQPEDEAEYYCVLWYSNRWVFGGGTKLTVLGGGGSQRFVTGHFGGLYPANGHHHHHH

SEQ ID NO: 573 - protein, 545 aa, Artificial Sequence
  Synthetic polypeptide
QRFCTGHFGGLHPCNGGGGGSQVQLQESGPGLVKPSQTLSLTCTVSGGSISSGGYYWSWIRQHPGKGLEWIGYIYYRGRTYYNPSLKSRVTISVDTSKNQFSLKLSSVTAADTAVYYCARVYSNYGWFDPWGQGTLVTVSSGGGGSGGGGSGGGGSEIVLTQSPGTLSLSPGERATLSCRASQSVSSSYLAWYQQKPGQAPRLLIYGASTRATGIPDRFSGSGSGTDFTLTISRLEPEDFAVYYCQQYGSSPSFGQGTKVEIKSGGGGSEVQLVESGGGLVQPGGSLKLSCAASGFTFNKYAMNWVRQAPGKGLEWVARIRSKYNNYATYYADSVKDRFTISRDDSKNTAYLQMNNLKTEDTAVYYCVRHGNFGNSYISYWAYWGQGTLVTVSSGGGGSGGGGSGGGGSQTVVTQEPSLTVSPGGTVTLTCGSSTGAVTSGNYPNWVQQKPGQAPRGLIGGTKFLAPGTPARFSGSLLGGKAALTLSGVQPEDEAEYYCVLWYSNRWVFGGGTKLTVLGGGGSQRFVTGHFGGLYPANGHHHHHH

SEQ ID NO: 574 - protein, 546 aa, Artificial Sequence
  Synthetic polypeptide
QRFCTGHFGGLHPCNGGGGGSQVQLQESGPGLVRPSQTLSLTCTVSGGSISSGGYYWSWIRQHPGKGLEWIGYIYYRGRTYYNPSLKSRVTISVDTSKNQFSLKLSSVTAADTAVYYCARVYSNYGWFDPWGQGTLVTVSSGGGGSGGGGSGGGGSEIVLTQSPGTLSLSPGERATLSCRASQSVSSSYLAWYQQKPGQAPRLLIYGASSRATGIPDRFSGSGSGTDFTLTISRLEPEDFAVYYCQQYDTSPLTFGGGTKVEIKSGGGGSEVQLVESGGGLVQPGGSLKLSCAASGFTFNKYAMNWVRQAPGKGLEWVARIRSKYNNYATYYADSVKDRFTISRDDSKNTAYLQMNNLKTEDTAVYYCVRHGNFGNSYISYWAYWGQGTLVTVSSGGGGSGGGGSGGGGSQTVVTQEPSLTVSPGGTVTLTCGSSTGAVTSGNYPNWVQQKPGQAPRGLIGGTKFLAPGTPARFSGSLLGGKAALTLSGVQPEDEAEYYCVLWYSNRWVFGGGTKLTVLGGGGSQRFVTGHFGGLYPANGHHHHHH

SEQ ID NO: 575 - protein, 545 aa, Artificial Sequence; identical to SEQ ID NO: 570
  Synthetic polypeptide

SEQ ID NO: 576 - protein, 546 aa, Artificial Sequence
  Synthetic polypeptide
QRFCTGHFGGLHPCNGGGGGSQVQLQESGPGLVKPSQTLSLTCTVSGGSISSGGYYWSWIRQHPGKGLEWIGYIYYRGRTYYNPSLKSRVTISVDTSKNQFSLKLSSVTAADTAVYYCARVYSNYGWFDPWGQGTLVTVSSGGGGSGGGGSGGGGSEIVLTQSPGTLSLSPGERATLSCRASQSVSSSYLAWYQQKPGQAPRLLIYGASSRATGIPDRFSGSGSGTDFTLTISRLEPEDFAVYYCQQYGSSPLTFGGGTKVEIKSGGGGSEVQLVESGGGLVQPGGSLKLSCAASGFTFNKYAMNWVRQAPGKGLEWVARIRSKYNNYATYYADSVKDRFTISRDDSKNTAYLQMNNLKTEDTAVYYCVRHGNFGNSYISYWAYWGQGTLVTVSSGGGGSGGGGSGGGGSQTVVTQEPSLTVSPGGTVTLTCGSSTGAVTSGNYPNWVQQKPGQAPRGLIGGTKFLAPGTPARFSGSLLGGKAALTLSGVQPEDEAEYYCVLWYSNRWVFGGGTKLTVLGGGGSQRFVTGHFGGLYPANGHHHHHH

SEQ ID NO: 577 - protein, 546 aa, Artificial Sequence
  Synthetic polypeptide
QRFCTGHFGGLHPCNGGGGGSQVQLQESGPGLVKPSQTLSLTCTVSGGSISSGGYYWSWVRQHPGKGLEWIGYIFYSGRTYYNPSLKSRVIISVDTSKNQFSLKLSSVTAADTAVYYCARVYSNYGWFDPWGQGTLVTVSSGGGGSGGGGSGGGGSEIVLTQSPGTLSLSPGERATLSCRASQSVSSSYLAWYQQKPGQAPRLLIYGASSRATGIPDRFSGSGSGTDFTLTISRLEPEDFAVYYCQQYGSSPLTFGGGTKVEIKSGGGGSEVQLVESGGGLVQPGGSLKLSCAASGFTFNKYAMNWVRQAPGKGLEWVARIRSKYNNYATYYADSVKDRFTISRDDSKNTAYLQMNNLKTEDTAVYYCVRHGNFGNSYISYWAYWGQGTLVTVSSGGGGSGGGGSGGGGSQTVVTQEPSLTVSPGGTVTLTCGSSTGAVTSGNYPNWVQQKPGQAPRGLIGGTKFLAPGTPARFSGSLLGGKAALTLSGVQPEDEAEYYCVLWYSNRWVFGGGTKLTVLGGGGSQRFVTGHFGGLYPANGHHHHHH

SEQ ID NO: 578 - protein, 546 aa, Artificial Sequence
  Synthetic polypeptide
QRFCTGHFGGLHPCNGGGGGSQVQLQESGPGLVKPSQTLSLTCTVSGGSISSGGYYWSWIRQHPGKGLEWIGYIFYSGRTYYNPSLKSRVTISVDTSKNQFSLKLSSVTAADTAVYYCARVYSNYGWFDPWGQGTLVTVSSGGGGSGGGGSGGGGSEIVLTQSPGTLSLSPGERATLSCRASQSVSSSYLAWYQQKPGQAPRLLIYGASSRATGIPDRFSGSGSGTDFTLTISRLEPEDFAVYYCQQYGSSPLTFGGGTKVEIKSGGGGSEVQLVESGGGLVQPGGSLKLSCAASGFTFNKYAMNWVRQAPGKGLEWVARIRSKYNNYATYYADSVKDRFTISRDDSKNTAYLQMNNLKTEDTAVYYCVRHGNFGNSYISYWAYWGQGTLVTVSSGGGGSGGGGSGGGGSQTVVTQEPSLTVSPGGTVTLTCGSSTGAVTSGNYPNWVQQKPGQAPRGLIGGTKFLAPGTPARFSGSLLGGKAALTLSGVQPEDEAEYYCVLWYSNRWVFGGGTKLTVLGGGGSQRFVTGHFGGLYPANGHHHHHH

SEQ ID NO: 579 - protein, 546 aa, Artificial Sequence
  Synthetic polypeptide
QRFCTGHFGGLHPCNGGGGGSQVQLQESGPGLVKPSQTLSLTCTVSGGSISSGGYYWSWIRQHPGKGLEWIGYIFYSGRTYYNPSLKSRVSISVDTSKNQFSLKLSSVTAADTAVYYCARVYSNYGWFDPWGQGTLVTVSSGGGGSGGGGSGGGGSEIVLTQSPGTLSLSPGERATLSCRASQSVSSSYLAWYQQKPGQAPRLLIYGASSRATGIPDRFSGSGSGTDFTLTISRLEPEDFAVYYCQQYGSSPLTFGGGTKVEIKSGGGGSEVQLVESGGGLVQPGGSLKLSCAASGFTFNKYAMNWVRQAPGKGLEWVARIRSKYNNYATYYADSVKDRFTISRDDSKNTAYLQMNNLKTEDTAVYYCVRHGNFGNSYISYWAYWGQGTLVTVSSGGGGSGGGGSGGGGSQTVVTQEPSLTVSPGGTVTLTCGSSTGAVTSGNYPNWVQQKPGQAPRGLIGGTKFLAPGTPARFSGSLLGGKAALTLSGVQPEDEAEYYCVLWYSNRWVFGGGTKLTVLGGGGSQRFVTGHFGGLYPANGHHHHHH

SEQ ID NO: 580 - protein, 546 aa, Artificial Sequence
  Synthetic polypeptide
QRFCTGHFGGLHPCNGGGGGSQVQLQESGPGLVKPSETLSLTCTVSGGSVSSGGYYWSWIRQPPGKGLEWIGYIYYRGRTYYNPSLKSRVTISVDTSKNQFSLKLSSVTAADTAVYYCARVYSNYGWFDPWGQGTLVTVSSGGGGSGGGGSGGGGSEIVLTQSPGTLSLSPGERATLSCRASQSVSSSYLAWYQQKPGQAPRLLIYGASSRATGIPDRFSGSGSGTDFTLTISRLEPEDFAVYYCQQYGSSPLTFGGGTKVEIKSGGGGSEVQLVESGGGLVQPGGSLKLSCAASGFTFNKYAMNWVRQAPGKGLEWVARIRSKYNNYATYYADSVKDRFTISRDDSKNTAYLQMNNLKTEDTAVYYCVRHGNFGNSYISYWAYWGQGTLVTVSSGGGGSGGGGSGGGGSQTVVTQEPSLTVSPGGTVTLTCGSSTGAVTSGNYPNWVQQKPGQAPRGLIGGTKFLAPGTPARFSGSLLGGKAALTLSGVQPEDEAEYYCVLWYSNRWVFGGGTKLTVLGGGGSQRFVTGHFGGLYPANGHHHHHH

SEQ ID NO: 581 - protein, 545 aa, Artificial Sequence
  Synthetic polypeptide
QRFCTGHFGGLHPCNGGGGGSQVQLQESGPGLVKPSQTLSLTCTVSGGSISSGGYYWSWIRQHPGKGLEWIGYIYYRGRTYYNPSLKSRVTISVDTSKNQFSLKLSSVTAADTAVYYCARVYSNYGWFDPWGQGTLVTVSSGGGGSGGGGSGGGGSEIVLTQSPGTLSLSPGERATLSCRASQSVSSSYLAWYQQKPGQAPRLLIYGASSRATGIPDRFSGSGSGTDFTLTISRLEPEDFAVYYCQQYGSSPTFGQGTRLEIKSGGGGSEVQLVESGGGLVQPGGSLKLSCAASGFTFNKYAMNWVRQAPGKGLEWVARIRSKYNNYATYYADSVKDRFTISRDDSKNTAYLQMNNLKTEDTAVYYCVRHGNFGNSYISYWAYWGQGTLVTVSSGGGGSGGGGSGGGGSQTVVTQEPSLTVSPGGTVTLTCGSSTGAVTSGNYPNWVQQKPGQAPRGLIGGTKFLAPGTPARFSGSLLGGKAALTLSGVQPEDEAEYYCVLWYSNRWVFGGGTKLTVLGGGGSQRFVTGHFGGLYPANGHHHHHH

SEQ ID NO: 582 - protein, 546 aa, Artificial Sequence
  Synthetic polypeptide
QRFCTGHFGGLHPCNGGGGGSQVQLQESGPGLVKPSQTLSLTCTVSGGSISSGGYYWSWIRQHPGKGLEWIGYIFYSGKTYYNPSLKSRVSISVDTSKNQFSLKLSSVTAADTAVYYCARVYSNYGWFDPWGQGTLVTVSSGGGGSGGGGSGGGGSEIVLTQSPGTLSLSPGERATLSCRASQSVSSSYLAWYQQKPGQAPRLLIYGASSRATGIPDRFSGSGSGTDFTLTISRLEPEDFAVYYCQQYGSSPITFGQGTRLEIKSGGGGSEVQLVESGGGLVQPGGSLKLSCAASGFTFNKYAMNWVRQAPGKGLEWVARIRSKYNNYATYYADSVKDRFTISRDDSKNTAYLQMNNLKTEDTAVYYCVRHGNFGNSYISYWAYWGQGTLVTVSSGGGGSGGGGSGGGGSQTVVTQEPSLTVSPGGTVTLTCGSSTGAVTSGNYPNWVQQKPGQAPRGLIGGTKFLAPGTPARFSGSLLGGKAALTLSGVQPEDEAEYYCVLWYSNRWVFGGGTKLTVLGGGGSQRFVTGHFGGLYPANGHHHHHH

SEQ ID NO: 583 - protein, 551 aa, Artificial Sequence
  Synthetic polypeptide
QRFCTGHFGGLHPCNGGGGGSQVQLQESGPGLVKPSETLSLTCTVSGGSISSYYWSWIRQPPGKGLEWIGYIYYSGSTNYNPSLKSRVTMSIDTSKNQFSLKLISVTAADTAVYYCARDQRRIVAAGGYYYGMDVWGQGTTVTVSSGGGGSGGGGSGGGGSEIVLTQSPGTLSLSPGERATLSCRASQSVSSSYLAWYQQKPGQAPRLLIYGASTRATGIPARFSGSGSGTDFTLTISRLEPEDFAVYYCQQYGSSPFTFGPGTKVDIKSGGGGSEVQLVESGGGLVQPGGSLKLSCAASGFTFNKYAMNWVRQAPGKGLEWVARIRSKYNNYATYYADSVKDRFTISRDDSKNTAYLQMNNLKTEDTAVYYCVRHGNFGNSYISYWAYWGQGTLVTVSSGGGGSGGGGSGGGGSQTVVTQEPSLTVSPGGTVTLTCGSSTGAVTSGNYPNWVQQKPGQAPRGLIGGTKFLAPGTPARFSGSLLGGKAALTLSGVQPEDEAEYYCVLWYSNRWVFGGGTKLTVLGGGGSQRFVTGHFGGLYPANGHHHHHH

SEQ ID NO: 584 - protein, 545 aa, Artificial Sequence
  Synthetic polypeptide
QRFCTGHFGGLHPCNGGGGGSQVQLQESGPGLVKPSQTLSLTCTVSGGSISSNDYYWSWIRQHPGKGLEWIGYIYYSGSTFYNPSLKSRGAISVDTSKNQFSLKLTSVTAADTAVYYCARGVYRTGAFDIWGQGTMVTVSSGGGGSGGGGSGGGGSDIQMTQSPSSLSASVGDRVTITCRASQSISSYLNWYQQKPGKAPKSLIYAASSLQSGVPSKFSGSGSGTDFTLTISSLQPEDIATYYCQQSYSTPQAFGGGTKVDIKSGGGGSEVQLVESGGGLVQPGGSLKLSCAASGFTFNKYAMNWVRQAPGKGLEWVARIRSKYNNYATYYADSVKDRFTISRDDSKNTAYLQMNNLKTEDTAVYYCVRHGNFGNSYISYWAYWGQGTLVTVSSGGGGSGGGGSGGGGSQTVVTQEPSLTVSPGGTVTLTCGSSTGAVTSGNYPNWVQQKPGQAPRGLIGGTKFLAPGTPARFSGSLLGGKAALTLSGVQPEDEAEYYCVLWYSNRWVFGGGTKLTVLGGGGSQRFVTGHFGGLYPANGHHHHHH

SEQ ID NO: 585 - protein, 546 aa, Artificial Sequence
  Synthetic polypeptide
QRFCTGHFGGLHPCNGGGGGSQVQLVQSGAEVKKPGASVKVSCKASGYTFTYYGISWVRQAPGQGLEWMGWINPYGGETNYAQKLQGRVTMTTDTSTSTAYMELRSLRSDDTAVYYCARGSGGFDYWGQGTLVTVSSGGGGSGGGGSGGGGSDIVMTQTPLSLSVTPGEPASISCRSSQSLLHSNGYNYLDWYLQKPGQSPQLLIYLGSYRASGVPDRFSGSGSGTDFTLKISRVEAEDVGVYYCMQALQTPFTFGPGTKVDIKSGGGGSEVQLVESGGGLVQPGGSLKLSCAASGFTFNKYAMNWVRQAPGKGLEWVARIRSKYNNYATYYADSVKDRFTISRDDSKNTAYLQMNNLKTEDTAVYYCVRHGNFGNSYISYWAYWGQGTLVTVSSGGGGSGGGGSGGGGSQTVVTQEPSLTVSPGGTVTLTCGSSTGAVTSGNYPNWVQQKPGQAPRGLIGGTKFLAPGTPARFSGSLLGGKAALTLSGVQPEDEAEYYCVLWYSNRWVFGGGTKLTVLGGGGSQRFVTGHFGGLYPANGHHHHHH

SEQ ID NO: 586 - protein, 546 aa, Artificial Sequence
  Synthetic polypeptide
QRFCTGHFGGLHPCNGGGGGSQVQLVQSGAEVKKPGASVKVSCKASGYTFTYYGISWVRQAPGQGLEWMGWINPYSGATNYAQKLQGRVTMTTDTSTSTAYMELRSLRSDDTAVYYCARGSGGFDYWGQGTLVTVSSGGGGSGGGGSGGGGSDIVMTQTPLSLSVTPGEPASISCRSSQSLLHSNGYNYLDWYLQKPGQSPQLLIYLGSYRASGVPDRFSGSGSGTDFTLKISRVEAEDVGVYYCMQALQTPFTFGPGTKVDIKSGGGGSEVQLVESGGGLVQPGGSLKLSCAASGFTFNKYAMNWVRQAPGKGLEWVARIRSKYNNYATYYADSVKDRFTISRDDSKNTAYLQMNNLKTEDTAVYYCVRHGNFGNSYISYWAYWGQGTLVTVSSGGGGSGGGGSGGGGSQTVVTQEPSLTVSPGGTVTLTCGSSTGAVTSGNYPNWVQQKPGQAPRGLIGGTKFLAPGTPARFSGSLLGGKAALTLSGVQPEDEAEYYCVLWYSNRWVFGGGTKLTVLGGGGSQRFVTGHFGGLYPANGHHHHHH

SEQ ID NO: 587 - protein, 546 aa, Artificial Sequence
  Synthetic polypeptide
QRFCTGHFGGLHPCNGGGGGSQVQLVQSGAEVKKPGASVKVSCKASGYTFTYYGISWVRQAPGQGLEWMGWINPYTGKTNYAQKLQGRVTMTTDTSTSTAYMELRSLRSDDTAVYYCARGSGGFDYWGQGTLVTVSSGGGGSGGGGSGGGGSDIVMTQTPLSLSVTPGEPASISCRSSQSLLHSNGYNYLDWYLQKPGQSPQLLIYLGSYRASGVPDRFSGSGSGTDFTLKISRVEAEDVGVYYCMQALQTPFTFGPGTKVDIKSGGGGSEVQLVESGGGLVQPGGSLKLSCAASGFTFNKYAMNWVRQAPGKGLEWVARIRSKYNNYATYYADSVKDRFTISRDDSKNTAYLQMNNLKTEDTAVYYCVRHGNFGNSYISYWAYWGQGTLVTVSSGGGGSGGGGSGGGGSQTVVTQEPSLTVSPGGTVTLTCGSSTGAVTSGNYPNWVQQKPGQAPRGLIGGTKFLAPGTPARFSGSLLGGKAALTLSGVQPEDEAEYYCVLWYSNRWVFGGGTKLTVLGGGGSQRFVTGHFGGLYPANGHHHHHH

SEQ ID NO: 588 - protein, 546 aa, Artificial Sequence
  Synthetic polypeptide
QRFCTGHFGGLHPCNGGGGGSQVQLVQSGAEVKKPGASVKVSCKASGYTFTYYGISWVRQAPGQGLEWMGWINPYTGKTNYAQKLQGRVTMTTDTSTSTAYMELRSLRSDDTAVYYCARGSGGFDYWGQGTLVTVSSGGGGSGGGGSGGGGSDIVMTQTPLSLSVTPGEPASISCRSSQSLLHSVGYNYLDWYLQKPGQSPQLLIYLGSYRASGVPDRFSGSGSGTDFTLKISRVEAEDVGVYYCMQALQTPFTFGPGTKVDIKSGGGGSEVQLVESGGGLVQPGGSLKLSCAASGFTFNKYAMNWVRQAPGKGLEWVARIRSKYNNYATYYADSVKDRFTISRDDSKNTAYLQMNNLKTEDTAVYYCVRHGNFGNSYISYWAYWGQGTLVTVSSGGGGSGGGGSGGGGSQTVVTQEPSLTVSPGGTVTLTCGSSTGAVTSGNYPNWVQQKPGQAPRGLIGGTKFLAPGTPARFSGSLLGGKAALTLSGVQPEDEAEYYCVLWYSNRWVFGGGTKLTVLGGGGSQRFVTGHFGGLYPANGHHHHHH

SEQ ID NO: 589 - protein, 546 aa, Artificial Sequence
  Synthetic polypeptide
QRFCTGHFGGLHPCNGGGGGSQVQLVQSGAEVKKPGASVKVSCKASGYTFTSYGISWVRQAPGQGLEWMGWINPYTGNRNYAQKVQDRVTMTTDTSTNTAYMELSSLRSDDTAVYYCARGSGGFDYWGQGTLVTVSSGGGGSGGGGSGGGGSDIVMTQSPLSLPVTLGQPASISCRSSQSLLHSVGYNYLDWYLQKPGQSPQLLIYLGSNRASGVPDRFSGSGSGTDFTLKISRVEAEDVGVYYCMQALQTPFTFGPGTKLEIKSGGGGSEVQLVESGGGLVQPGGSLKLSCAASGFTFNKYAMNWVRQAPGKGLEWVARIRSKYNNYATYYADSVKDRFTISRDDSKNTAYLQMNNLKTEDTAVYYCVRHGNFGNSYISYWAYWGQGTLVTVSSGGGGSGGGGSGGGGSQTVVTQEPSLTVSPGGTVTLTCGSSTGAVTSGNYPNWVQQKPGQAPRGLIGGTKFLAPGTPARFSGSLLGGKAALTLSGVQPEDEAEYYCVLWYSNRWVFGGGTKLTVLGGGGSQRFVTGHFGGLYPANGHHHHHH

SEQ ID NO: 590 - protein, 546 aa, Artificial Sequence
  Synthetic polypeptide
QRFCTGHFGGLHPCNGGGGGSQVQLVQSGAEVKKPGASVKVSCKASGYTFTYYGISWVRQAPGQGLEWMGWINPYTGKTNYAQKLQDRVTMTTDTSTNTAYMELRSLRSDDTAVYYCARGSGGFDYWGQGTLVTVSSGGGGSGGGGSGGGGSDIVMTQTPLSLPVTPGEPASISCRSSQSLLHSVGYNYLDWYLQKPGQSPQLLIYLGSNRASGVPDRFSGSGSGTDFTLKISRVEAEDVGVYYCMQALQTPFTFGPGTKVDIKSGGGGSEVQLVESGGGLVQPGGSLKLSCAASGFTFNKYAMNWVRQAPGKGLEWVARIRSKYNNYATYYADSVKDRFTISRDDSKNTAYLQMNNLKTEDTAVYYCVRHGNFGNSYISYWAYWGQGTLVTVSSGGGGSGGGGSGGGGSQTVVTQEPSLTVSPGGTVTLTCGSSTGAVTSGNYPNWVQQKPGQAPRGLIGGTKFLAPGTPARFSGSLLGGKAALTLSGVQPEDEAEYYCVLWYSNRWVFGGGTKLTVLGGGGSQRFVTGHFGGLYPANGHHHHHH

SEQ ID NO: 591 - protein, 546 aa, Artificial Sequence
  Synthetic polypeptide
QRFCTGHFGGLHPCNGGGGGSQVQLVQSGAEVKKPGASVKVSCKASGYTFTTYGISWVRQAPGQGLEWMGWINPYTGKTNYAQKLQGRVTMATDTSTSTAYMELRSLRSDDTAVYYCARGSGGFDYWGQGTLVTVSSGGGGSGGGGSGGGGSDIVMTQSPLSLPVTPGEPASISCRSSQSLLHSVGYNYLDWYLQKPGQSPQLLIYLGSNRASGVPDRFSGSGSGTDFTLKISRVEAEDVGVYYCMQALQTPFTFGPGTKLEIKSGGGGSEVQLVESGGGLVQPGGSLKLSCAASGFTFNKYAMNWVRQAPGKGLEWVARIRSKYNNYATYYADSVKDRFTISRDDSKNTAYLQMNNLKTEDTAVYYCVRHGNFGNSYISYWAYWGQGTLVTVSSGGGGSGGGGSGGGGSQTVVTQEPSLTVSPGGTVTLTCGSSTGAVTSGNYPNWVQQKPGQAPRGLIGGTKFLAPGTPARFSGSLLGGKAALTLSGVQPEDEAEYYCVLWYSNRWVFGGGTKLTVLGGGGSQRFVTGHFGGLYPANGHHHHHH

SEQ ID NO: 592 - protein, 546 aa, Artificial Sequence
  Synthetic polypeptide
QRFCTGHFGGLHPCNGGGGGSQVQLVQSGAEVKEPGASVKVSCKASGYTFTYYGISWVRQAPGQGLEWMGWINPYTGNRNYAQKVQDRVTMTTDTSTNTAYMELRSLRSDDTAVYYCARGSGGFDYWGQGTLVTVSSGGGGSGGGGSGGGGSDIVMTQSPLSLPVTPGEPASISCRSSQSLLHSVGYNYLDWYLQKPGQSPQLLIYLGSNRASGVPDRFSGSGSGTDFTLKISRVEAEDVGVYYCMQALQTPFTFGPGTKLEIKSGGGGSEVQLVESGGGLVQPGGSLKLSCAASGFTFNKYAMNWVRQAPGKGLEWVARIRSKYNNYATYYADSVKDRFTISRDDSKNTAYLQMNNLKTEDTAVYYCVRHGNFGNSYISYWAYWGQGTLVTVSSGGGGSGGGGSGGGGSQTVVTQEPSLTVSPGGTVTLTCGSSTGAVTSGNYPNWVQQKPGQAPRGLIGGTKFLAPGTPARFSGSLLGGKAALTLSGVQPEDEAEYYCVLWYSNRWVFGGGTKLTVLGGGGSQRFVTGHFGGLYPANGHHHHHH

SEQ ID NO: 593 - protein, 546 aa, Artificial Sequence
  Synthetic polypeptide
QRFCTGHFGGLHPCNGGGGGSQVQLVQSGAEVKKPGASVKVSCKASGYTFTYYGISWVRQAPGQGLEWMGWINPYTGKTNYAQKLQGRVTMTTDTSTSTAYMELRSLRSDDTAVYYCARGSGGFDYWGQGTLVTVSSGGGGSGGGGSGGGGSDIVMTQSPLSLPVTPGEPASISCRSSQSLLHSVGYNYLDWYLQKPGQSPQLLIYLGSNRASGVPDRFSGSGSGTDFTLKISRVEAEDVGVYYCMQALQTPFTFGPGTKVEIKSGGGGSEVQLVESGGGLVQPGGSLKLSCAASGFTFNKYAMNWVRQAPGKGLEWVARIRSKYNNYATYYADSVKDRFTISRDDSKNTAYLQMNNLKTEDTAVYYCVRHGNFGNSYISYWAYWGQGTLVTVSSGGGGSGGGGSGGGGSQTVVTQEPSLTVSPGGTVTLTCGSSTGAVTSGNYPNWVQQKPGQAPRGLIGGTKFLAPGTPARFSGSLLGGKAALTLSGVQPEDEAEYYCVLWYSNRWVFGGGTKLTVLGGGGSQRFVTGHFGGLYPANGHHHHHH

SEQ ID NO: 594 - protein, 546 aa, Artificial Sequence
  Synthetic polypeptide
QRFCTGHFGGLHPCNGGGGGSQVQLVQSGAEVKKPGASVKVSCKASGYTFTSYGITWVRQAPGQGLEWMGWINPYTGNRNYAQKVQGRVTMTTDTSTSTAYMELRSLRSDDTAVYYCARGSGGFDYWGQGTLVTVSSGGGGSGGGGSGGGGSDIVMTQSPLSLSVTPGEPASISCRSSQSLLHSVGYNYLDWYLQKPGQSPQLLIYLGSNRASGVPDRFSGSGSGTDFTLKISRVEAEDVGVYYCMQALQTPFTFGPGTKVDIKSGGGGSEVQLVESGGGLVQPGGSLKLSCAASGFTFNKYAMNWVRQAPGKGLEWVARIRSKYNNYATYYADSVKDRFTISRDDSKNTAYLQMNNLKTEDTAVYYCVRHGNFGNSYISYWAYWGQGTLVTVSSGGGGSGGGGSGGGGSQTVVTQEPSLTVSPGGTVTLTCGSSTGAVTSGNYPNWVQQKPGQAPRGLIGGTKFLAPGTPARFSGSLLGGKAALTLSGVQPEDEAEYYCVLWYSNRWVFGGGTKLTVLGGGGSQRFVTGHFGGLYPANGHHHHHH

SEQ ID NO: 595 - protein, 546 aa, Artificial Sequence
  Synthetic polypeptide
QRFCTGHFGGLHPCNGGGGGSQVQLVQSGAEVKKPGASVKVSCKASGYTFTSYGISWVRQAPGQGLEWMGWINPYTGNRNYAQKFQGRVTMTTDTSTNTAYMELSSLRSEDTAVYYCARGSGGFDYWGQGTLVTVSSGGGGSGGGGSGGGGSDIVMTQSPLSLPVTPGEPASISCRSSQSLLHSVGYNYLDWYLQKPGQSPQLLIYLGSNRASGVPDRFSGSGSGTDFTLKISRVEAEDVGVYYCMQALQTPFTFGPGTKVDIKSGGGGSEVQLVESGGGLVQPGGSLKLSCAASGFTFNKYAMNWVRQAPGKGLEWVARIRSKYNNYATYYADSVKDRFTISRDDSKNTAYLQMNNLKTEDTAVYYCVRHGNFGNSYISYWAYWGQGTLVTVSSGGGGSGGGGSGGGGSQTVVTQEPSLTVSPGGTVTLTCGSSTGAVTSGNYPNWVQQKPGQAPRGLIGGTKFLAPGTPARFSGSLLGGKAALTLSGVQPEDEAEYYCVLWYSNRWVFGGGTKLTVLGGGGSQRFVTGHFGGLYPANGHHHHHH

SEQ ID NO: 596 - protein, 546 aa, Artificial Sequence
  Synthetic polypeptide
QRFCTGHFGGLHPCNGGGGGSQVQLVQSGAEVKKPGASVKVSCKASGYSFTSYGISWVRQAPGQGLEWMGWINPYTGNRNYAQKVQGRVTMTTDTSTSTAYMELRSLRSDDTAVYYCARGSGGFDYWGQGTLVTVSSGGGGSGGGGSGGGGSDIVMTQSPLSLPVTPGEPASISCRSSQSLLHSVGYNYLDWYLQKPGQSPQLLIYLGSNRASGVPDRFSGSGSGTDFTLKISRVEAEDVGVYYCMQALQTPFTFGPGTKVEIKSGGGGSEVQLVESGGGLVQPGGSLKLSCAASGFTFNKYAMNWVRQAPGKGLEWVARIRSKYNNYATYYADSVKDRFTISRDDSKNTAYLQMNNLKTEDTAVYYCVRHGNFGNSYISYWAYWGQGTLVTVSSGGGGSGGGGSGGGGSQTVVTQEPSLTVSPGGTVTLTCGSSTGAVTSGNYPNWVQQKPGQAPRGLIGGTKFLAPGTPARFSGSLLGGKAALTLSGVQPEDEAEYYCVLWYSNRWVFGGGTKLTVLGGGGSQRFVTGHFGGLYPANGHHHHHH

SEQ ID NO: 597 - protein, 546 aa, Artificial Sequence
  Synthetic polypeptide
QRFCTGHFGGLHPCNGGGGGSQVQLVQSGAEVKKPGASVKVSCKASGYTFTYYGISWVRQAPGQGLEWMGWINPYTGKTNYAQKVQGRVTMTTDTSTSTAYMELRNLRSDDTAVYYCARGSGGFDYWGQGTLVTVSSGGGGSGGGGSGGGGSDIVMTQTPLSLSVTPGQPASISCRSSQSLLHSVGYNYLDWYLQKPGQSPQLLIYLGSNRASGVPDRFSGSGSGTDFTLKISRVEAEDVGVYYCMQALQTPFTFGPGTKVDIKSGGGGSEVQLVESGGGLVQPGGSLKLSCAASGFTFNKYAMNWVRQAPGKGLEWVARIRSKYNNYATYYADSVKDRFTISRDDSKNTAYLQMNNLKTEDTAVYYCVRHGNFGNSYISYWAYWGQGTLVTVSSGGGGSGGGGSGGGGSQTVVTQEPSLTVSPGGTVTLTCGSSTGAVTSGNYPNWVQQKPGQAPRGLIGGTKFLAPGTPARFSGSLLGGKAALTLSGVQPEDEAEYYCVLWYSNRWVFGGGTKLTVLGGGGSQRFVTGHFGGLYPANGHHHHHH

SEQ ID NO: 598 - protein, 546 aa, Artificial Sequence
  Synthetic polypeptide
QRFCTGHFGGLHPCNGGGGGSQVQLVQSGAEVKKPGASVKVSCKASGYTFTYYGISWVRQAPGQGLEWMGWINPYTGKTNYAQKLQGRVTMTTDTSTSTAYMELRSLRSDDTAVYYCARGSGGFDYWGQGTLVTVSSGGGGSGGGGSGGGGSDIVMTQTPLSLSVTPGQPASISCRSSQSLLHSVGYNYLDWYLQKPGQSPQLLIYLGSNRASGVPDRFSGSGSGTDFTLKISRVEAEDVGVYYCMQALQTPFTFGPGTKVDIKSGGGGSEVQLVESGGGLVQPGGSLKLSCAASGFTFNKYAMNWVRQAPGKGLEWVARIRSKYNNYATYYADSVKDRFTISRDDSKNTAYLQMNNLKTEDTAVYYCVRHGNFGNSYISYWAYWGQGTLVTVSSGGGGSGGGGSGGGGSQTVVTQEPSLTVSPGGTVTLTCGSSTGAVTSGNYPNWVQQKPGQAPRGLIGGTKFLAPGTPARFSGSLLGGKAALTLSGVQPEDEAEYYCVLWYSNRWVFGGGTKLTVLGGGGSQRFVTGHFGGLYPANGHHHHHH

SEQ ID NO: 599 - protein, 550 aa, Artificial Sequence
  Synthetic polypeptide
QRFCTGHFGGLHPCNGGGGGSQVQLVESGGGVVQPGRSLRLSCAASGFTFRNYAMHWVRQAPGKGLEWVAVISYSGNNKYYASSVKGRFTISRDNSKNTLYLQLNSLRAEDTAVYYCAREFYYDSTGYDYSTPGDYWGQGTLVTVSSGGGGSGGGGSGGGGSDIQMTQSPSSLSASVGDRVTITCQASQDISNYLNWYQQKPGKAPKLLIYDASNLETGVPSRFSGSGSGTDFTFTISSLQPEDIATYYCQQYDNLPTFGQGTRLEIKSGGGGSEVQLVESGGGLVQPGGSLKLSCAASGFTFNKYAMNWVRQAPGKGLEWVARIRSKYNNYATYYADSVKDRFTISRDDSKNTAYLQMNNLKTEDTAVYYCVRHGNFGNSYISYWAYWGQGTLVTVSSGGGGSGGGGSGGGGSQTVVTQEPSLTVSPGGTVTLTCGSSTGAVTSGNYPNWVQQKPGQAPRGLIGGTKFLAPGTPARFSGSLLGGKAALTLSGVQPEDEAEYYCVLWYSNRWVFGGGTKLTVLGGGGSQRFVTGHFGGLYPANGHHHHHH

SEQ ID NO: 600 - protein, 551 aa, Artificial Sequence
  Synthetic polypeptide
QRFCTGHFGGLHPCNGGGGGSQVQLVESGGGVVQPGRSLRLSCVASGFTFRNYAMHWVRQAPGKGLEWVAVISYSGNNKYYASSVKGRFTISRDNSKNTLYLQLNSLRAEDTAVYYCAREFYYDSTGYDYSTPGDYWGQGTLVTVSSGGGGSGGGGSGGGGSDIQMTQSPSSLSASVGDRVTITCRASQSISSYLNWYQQKPGKAPKLLIYDASSLQSGVPSRFSGSGSGTEFTLTISSLQAEDVAVYYCQQYYSTPLTFGGGTKVDIKSGGGGSEVQLVESGGGLVQPGGSLKLSCAASGFTFNKYAMNWVRQAPGKGLEWVARIRSKYNNYATYYADSVKDRFTISRDDSKNTAYLQMNNLKTEDTAVYYCVRHGNFGNSYISYWAYWGQGTLVTVSSGGGGSGGGGSGGGGSQTVVTQEPSLTVSPGGTVTLTCGSSTGAVTSGNYPNWVQQKPGQAPRGLIGGTKFLAPGTPARFSGSLLGGKAALTLSGVQPEDEAEYYCVLWYSNRWVFGGGTKLTVLGGGGSQRFVTGHFGGLYPANGHHHHHH

SEQ ID NO: 601 - protein, 551 aa, Artificial Sequence
  Synthetic polypeptide
QRFCTGHFGGLHPCNGGGGGSQVQLVESGGGVVQPGRSLRLSCAASGFTFRNYAMHWVRQAPGKGLEWVAGISYSGTNKYYASSVKGRFTISRDNSKNTLYLQLNSLRAEDTAVYYCAREFYYDSTGYDYSTPGDYWGQGTLVTVSSGGGGSGGGGSGGGGSDIQMTQSPSSLSASVGDRVTITCQASQDISNYLNWYQQKPGKAPKLLIYDASNLETGVPSRFSGSGSGTEFTLTISSLQPEDIATYYCQQYDNLPLTFGGGTKVDIKSGGGGSEVQLVESGGGLVQPGGSLKLSCAASGFTFNKYAMNWVRQAPGKGLEWVARIRSKYNNYATYYADSVKDRFTISRDDSKNTAYLQMNNLKTEDTAVYYCVRHGNFGNSYISYWAYWGQGTLVTVSSGGGGSGGGGSGGGGSQTVVTQEPSLTVSPGGTVTLTCGSSTGAVTSGNYPNWVQQKPGQAPRGLIGGTKFLAPGTPARFSGSLLGGKAALTLSGVQPEDEAEYYCVLWYSNRWVFGGGTKLTVLGGGGSQRFVTGHFGGLYPANGHHHHHH

SEQ ID NO: 602 - protein, 551 aa, Artificial Sequence
  Synthetic polypeptide
QRFCTGHFGGLHPCNGGGGGSQVQLVESGGGVVQPGRSLRLSCVASGFTFRNYAMHWVRQAPGKGLEWVAVISYSGNNKYYASSVKGRFTISRDNSKNTLFLQLNSLRAEDTAVYYCAREFYYDSTGYDYSTPGNYWGQGTLVTVSSGGGGSGGGGSGGGGSDIQMTQSPSSLSASVGDRVTITCQASQDISNYLNWYQQKPGKAPKLLIYDASNLETGVPSRFSGSGSGTDFTFTISSLQPEDIATYYCQQYVNLPLTFGGGTKLEIKSGGGGSEVQLVESGGGLVQPGGSLKLSCAASGFTFNKYAMNWVRQAPGKGLEWVARIRSKYNNYATYYADSVKDRFTISRDDSKNTAYLQMNNLKTEDTAVYYCVRHGNFGNSYISYWAYWGQGTLVTVSSGGGGSGGGGSGGGGSQTVVTQEPSLTVSPGGTVTLTCGSSTGAVTSGNYPNWVQQKPGQAPRGLIGGTKFLAPGTPARFSGSLLGGKAALTLSGVQPEDEAEYYCVLWYSNRWVFGGGTKLTVLGGGGSQRFVTGHFGGLYPANGHHHHHH

SEQ ID NO: 603 - protein, 548 aa, Artificial Sequence
  Synthetic polypeptide
QRFCTGHFGGLHPCNGGGGGSQVQLVESGGGVVQPGRSLRLSCAASGFTFSSYGMQWVRQAPGKGLEWVAVIWYSGSNKYYASSVKGRFTISRDNSKNTLYLQMNSLRAEDTAVYYCARDGYPIFYRYYGMDVWGQGTTVTVSSGGGGSGGGGSGGGGSDIQMTQSPSSLSASVGDRVTITCRASQGISNYLAWYQQKPGKVPKLLIYAASTLQSGVPSRFSGSGSGTDFTLTISSLQPEDVATYYCQKYNSAPLTFGGGTKVEIKSGGGGSEVQLVESGGGLVQPGGSLKLSCAASGFTFNKYAMNWVRQAPGKGLEWVARIRSKYNNYATYYADSVKDRFTISRDDSKNTAYLQMNNLKTEDTAVYYCVRHGNFGNSYISYWAYWGQGTLVTVSSGGGGSGGGGSGGGGSQTVVTQEPSLTVSPGGTVTLTCGSSTGAVTSGNYPNWVQQKPGQAPRGLIGGTKFLAPGTPARFSGSLLGGKAALTLSGVQPEDEAEYYCVLWYSNRWVFGGGTKLTVLGGGGSQRFVTGHFGGLYPANGHHHHHH

SEQ ID NO: 604 - protein, 549 aa, Artificial Sequence
  Synthetic polypeptide
QRFCTGHFGGLHPCNGGGGGSQVQLVESGGGVVQPGRSLRLSCAASGFTFSSYGMHWVRQAPGKGLEWVAVISYSGSNKYYASSVKGRFTISRDNSKNTLYLQMNSLRAEDTAVYYCARDGYPIFYRYYGMDVWGQGTTVTVSSGGGGSGGGGSGGGGSEIVLTQSPGTLSLSPGERATLSCRASQSVSSSYLAWYQQKPGQAPRLLIYGASSRATGIPDRFSGSGSGTDFTLTISRLEPEDLAVYYCQQYGTSPLTFGGGTKLEIKSGGGGSEVQLVESGGGLVQPGGSLKLSCAASGFTFNKYAMNWVRQAPGKGLEWVARIRSKYNNYATYYADSVKDRFTISRDDSKNTAYLQMNNLKTEDTAVYYCVRHGNFGNSYISYWAYWGQGTLVTVSSGGGGSGGGGSGGGGSQTVVTQEPSLTVSPGGTVTLTCGSSTGAVTSGNYPNWVQQKPGQAPRGLIGGTKFLAPGTPARFSGSLLGGKAALTLSGVQPEDEAEYYCVLWYSNRWVFGGGTKLTVLGGGGSQRFVTGHFGGLYPANGHHHHHH

SEQ ID NO: 605 - protein, 549 aa, Artificial Sequence
  Synthetic polypeptide
QRFCTGHFGGLHPCNGGGGGSQVQLVESGGGVVQPGRSLRLSCAASGFTFSSFGMHWVRQAPGKGLEWVAFIWYSGSNKYYASSVKGRVTISRDNSKNTLYLQMNSLRAEDTAVYYCARDGYPIFYYYYGMDVWGQGTTVTVSSGGGGSGGGGSGGGGSEIVLTQSPGTLSLSPGERATLSCRASQSVSSSYLAWYQQKPGQAPRLLIYGASSRATGIPDRFSGSGSGTDFTLTISRLEPEDFAVYYCQQYGSSPFTFGPGTRLEIKSGGGGSEVQLVESGGGLVQPGGSLKLSCAASGFTFNKYAMNWVRQAPGKGLEWVARIRSKYNNYATYYADSVKDRFTISRDDSKNTAYLQMNNLKTEDTAVYYCVRHGNFGNSYISYWAYWGQGTLVTVSSGGGGSGGGGSGGGGSQTVVTQEPSLTVSPGGTVTLTCGSSTGAVTSGNYPNWVQQKPGQAPRGLIGGTKFLAPGTPARFSGSLLGGKAALTLSGVQPEDEAEYYCVLWYSNRWVFGGGTKLTVLGGGGSQRFVTGHFGGLYPANGHHHHHH

SEQ ID NO: 606 - protein, 574 aa, Artificial Sequence
  Synthetic polypeptide
QRFVTGHFGGLHPANGGGGGSQVQLVESGGGVVQPGGSLRLSCAASGFTFSSYGMHWVRQAPGKGLEWVAFIWYDGSNKYYADSVKDRFTISRDNSKNTLYLQMNSLRAEDTAVYYCARRAGIIGTIGYYYGMDVWGQGTTVTVSSGGGGSGGGGSGGGGSSYELTQPPSVSVSPGQTASITCSGDRLGEKYTSWYQQRPGQSPLLVIYQDTKRPSGIPERFSGSNSGNTATLTISGTQAMDEADYYCQAWESSTVVFGGGTKLTVLSGGGGSEVQLVESGGGLVQPGGSLKLSCAASGFTFNKYAMNWVRQAPGKGLEWVARIRSKYNNYATYYADSVKDRFTISRDDSKNTAYLQMNNLKTEDTAVYYCVRHGNFGNSYISYWAYWGQGTLVTVSSGGGGSGGGGSGGGGSQTVVTQEPSLTVSPGGTVTLTCGSSTGAVTSGNYPNWVQQKPGQAPRGLIGGTKFLAPGTPARFSGSLLGGKAALTLSGVQPEDEAEYYCVLWYSNRWVFGGGTKLTVLGGGGSQRFCTGHFGGLHPCNGGGGGSGGGSRDWDFDVFGGGTPVGGHHHHHH

SEQ ID NO: 607 - protein, 574 aa, Artificial Sequence
  Synthetic polypeptide
QRFVTGHFGGLHPANGGGGGSQVQLVESGGGVVQPGGSLRLSCAASGFTFSSYGMHWVRQAPGKGLEWVAFIWYDGSNKYYADSVKDRFTISRDNSKNTLYLQMNSLRAEDTAVYYCARRAGIIGTIGYYYGMDVWGQGTTVTVSSGGGGSGGGGSGGGGSSYELTQPPSVSVSPGQTASITCSGDRLGEKYTSWYQQRPGQSPLLVIYQDTKRPSGIPERFSGSNSGNTATLTISGTQAMDEADYYCQAWESSTVVFGGGTKLTVLSGGGGSEVQLVESGGGLVQPGGSLKLSCAASGFTFNKYAMNWVRQAPGKGLEWVARIRSKYNNYATYYADSVKDRFTISRDDSKNTAYLQMNNLKTEDTAVYYCVRHGNFGNSYISYWAYWGQGTLVTVSSGGGGSGGGGSGGGGSQTVVTQEPSLTVSPGGTVTLTCGSSTGAVTSGNYPNWVQQKPGQAPRGLIGGTKFLAPGTPARFSGSLLGGKAALTLSGVQPEDEAEYYCVLWYSNRWVFGGGTKLTVLGGGGSQRFVTGHFGGLHPANGGGGGSGGGSRDWDFDVFGGGTPVGGHHHHHH

SEQ ID NO: 608 - protein, 574 aa, Artificial Sequence
  Synthetic polypeptide
QRFVTGHFGGLYPANGGGGGSQVQLVESGGGVVQPGGSLRLSCAASGFTFSSYGMHWVRQAPGKGLEWVAFIWYDGSNKYYADSVKDRFTISRDNSKNTLYLQMNSLRAEDTAVYYCARRAGIIGTIGYYYGMDVWGQGTTVTVSSGGGGSGGGGSGGGGSSYELTQPPSVSVSPGQTASITCSGDRLGEKYTSWYQQRPGQSPLLVIYQDTKRPSGIPERFSGSNSGNTATLTISGTQAMDEADYYCQAWESSTVVFGGGTKLTVLSGGGGSEVQLVESGGGLVQPGGSLKLSCAASGFTFNKYAMNWVRQAPGKGLEWVARIRSKYNNYATYYADSVKDRFTISRDDSKNTAYLQMNNLKTEDTAVYYCVRHGNFGNSYISYWAYWGQGTLVTVSSGGGGSGGGGSGGGGSQTVVTQEPSLTVSPGGTVTLTCGSSTGAVTSGNYPNWVQQKPGQAPRGLIGGTKFLAPGTPARFSGSLLGGKAALTLSGVQPEDEAEYYCVLWYSNRWVFGGGTKLTVLGGGGSQRFVTGHFGGLHPANGGGGGSGGGSRDWDFDVFGGGTPVGGHHHHHH

SEQ ID NO: 609 - protein, 16 aa, Artificial Sequence
  Synthetic polypeptide
RDWDFDVFGGGTPVGG

SEQ ID NO: 610 - protein, 105 aa, Homo sapiens
QDGNEEMGGITQTPYKVSISGTTVILTCPQYPGSEILWQHNDKNIGGDEDDKNIGSDEDHLSLKEFSELEQSGYYVCYPRGSKPEDANFYLYLRARVCENCMEMD

SEQ ID NO: 611 - protein, 772 aa, Homo sapiens
MNCYLLLRFMLGIPLLWPCLGATENSQTKKVKQPVRSHLRVKRGWVWNQFFVPEEMNTTSHHIGQLRSDLDNGNNSFQYKLLGAGAGSTFIIDERTGDIYAIQKLDREERSLYILRAQVIDIATGRAVEPESEFVIKVSDINDNEPKFLDEPYEAIVPEMSPEGTLVIQVTASDADDPSSGNNARLLYSLLQGQPYFSVEPTTGVIRISSKMDRELQDEYWVIIQAKDMIGQPGALSGTTSVLIKLSDVNDNKPIFKESLYRLTVSESAPTGTSIGTIMAYDNDIGENAEMDYSIEEDDSQTFDIITNHETQEGIVILKKKVDFEHQNHYGIRAKVKNHHVPEQLMKYHTEASTTFIKIQVEDVDEPPLFLLPYYVFEVFEETPQGSFVGVVSATDPDNRKSPIRYSITRSKVFNINDNGTITTSNSLDREISAWYNLSITATEKYNIEQISSIPLYVQVLNINDHAPEFSQYYETYVCENAGSGQVIQTISAVDRDESIEEHHFYFNLSVEDTNNSSFTIIDNQDNTAVILTNRTGFNLQEEPVFYISILIADNGIPSLTSTNTLTIHVCDCGDSGSTQTCQYQELVLSMGFKTEVIIAILICIMIIFGFIFLTLGLKQRRKQILFPEKSEDFRENIFQYDDEGGGEEDTEAFDIAELRSSTIMRERKTRKTTSAEIRSLYRQSLQVGPDSAIFRKFILEKLEEANTDPCAPPFDSLQTYAFEGTGSLAGSLSSLESAVSDQDESYDYLNELGPRFKRLACMFGSAVQSNN

SEQ ID NO: 612 - protein, 772 aa, Macaca fascicularis
MNCYLLLPFMLGIPLLWPCLGATENSQTKKVQQPVGSHLRVKRGWVWNQFFVPEEMNTTSHHVGRLRSDLDNGNNSFQYKLLGAGAGSTFIIDERTGDIYAIEKLDREERSLYILRAQVIDITTGRAVEPESEFVIKVSDINDNEPKFLDEPYEAIVPEMSPEGTLVIQVTASDADDPSSGNNARLLYSLLQGQPYFSVEPTTGVIRISSKMDRELQDEYWVIIQAKDMIGQPGALSGTTSVLIKLSDVNDNKPIFKESLYRLTVSESAPTGTSIGTIMAYDNDIGENAEMDYSIEEDDSQTFDIITNHETQEGIVILKKKVNFEHQNHYGIRAKVKNHHVDEQLMKYHTEASTTFIKIQVEDVDEPPLFLLPYYIFEIFEETPQGSFVGVVSATDPDNRKSPIRYSITRSKVFNIDDNGTITTTNSLDREISAWYNLSITATEKYNIEQISSIPVYVQVLNINDHAPEFSQYYESYVCENAGSGQVIQTISAVDRDESIEEHHFYFNLSVEDTNSSSFTIIDNQDNTAVILTNRTGFNLQEEPIFYISILIADNGIPSLTSTNTLTIHVCDCDDSGSTQTCQYQELMLSMGFKTEVIIAILICIMVIFGFIFLTLGLKQRRKQILFPEKSEDFRENIFRYDDEGGGEEDTEAFDVAALRSSTIMRERKTRKTTSAEIRSLYRQSLQVGPDSAIFRKFILEKLEEADTDPCAPPFDSLQTYAFEGTGSLAGSLSSLESAVSDQDESYDYLNELGPRFKRLACMFGSAVQSNN

SEQ ID NO: 613 - protein, 5 aa, Artificial Sequence
  Synthetic Polypeptide
NYGMN

SEQ ID NO: 614 - protein, 17 aa, Artificial Sequence
  Synthetic Polypeptide
WINTYTGEPTYADKFQG

SEQ ID NO: 615 - protein, 13 aa, Artificial Sequence
  Synthetic Polypeptide
WSWSDGYYVYFDY

SEQ ID NO: 616 - protein, 17 aa, Artificial Sequence
  Synthetic Polypeptide
KSSQSVLDSSTNKNSLA

SEQ ID NO: 617 - protein, 7 aa, Artificial Sequence
  Synthetic Polypeptide
WASTRES

SEQ ID NO: 618 - protein, 9 aa, Artificial Sequence
  Synthetic Polypeptide
QQSAHFPIT

SEQ ID NO: 619 - protein, 122 aa, Artificial Sequence
  Synthetic Polypeptide
QVQLVQSGAEVKKPGESVKVSCKASGYTFTNYGMNWVKQAPGQGLEWMGWINTYTGEPTYADKFQGRVTMTTDTSTSTAYMEIRNLGGDDTAVYYCARWSWSDGYYVYFDYWGQGTSVTVSS

SEQ ID NO: 620 - protein, 113 aa, Artificial Sequence
  Synthetic Polypeptide
DIVMTQSPDSLTVSLGERTTINCKSSQSVLDSSTNKNSLAWYQQKPGQPPKLLLSWASTRESGIPDRFSGSGSGTDFTLTIDSPQPEDSATYYCQQSAHFPITFGQGTRLEIK

SEQ ID NO: 621 - protein, 250 aa, Artificial Sequence
  Synthetic Polypeptide
QVQLVQSGAEVKKPGESVKVSCKASGYTFTNYGMNWVKQAPGQGLEWMGWINTYTGEPTYADKFQGRVTMTTDTSTSTAYMEIRNLGGDDTAVYYCARWSWSDGYYVYFDYWGQGTSVTVSSGGGGSGGGGSGGGGSDIVMTQSPDSLTVSLGERTTINCKSSQSVLDSSTNKNSLAWYQQKPGQPPKLLLSWASTRESGIPDRFSGSGSGTDFTLTIDSPQPEDSATYYCQQSAHFPITFGQGTRLEIK

SEQ ID NO: 622 - protein, 553 aa, Artificial Sequence
  Synthetic Polypeptide
QRFVTGHFGGLYPANGGGGGSQVQLVQSGAEVKKPGESVKVSCKASGYTFTNYGMNWVKQAPGQGLEWMGWINTYTGEPTYADKFQGRVTMTTDTSTSTAYMEIRNLGGDDTAVYYCARWSWSDGYYVYFDYWGQGTSVTVSSGGGGSGGGGSGGGGSDIVMTQSPDSLTVSLGERTTINCKSSQSVLDSSTNKNSLAWYQQKPGQPPKLLLSWASTRESGIPDRFSGSGSGTDFTLTIDSPQPEDSATYYCQQSAHFPITFGQGTRLEIKSGGGGSEVQLVESGGGLVQPGGSLKLSCAASGFTFNKYAMNWVRQAPGKGLEWVARIRSKYNNYATYYADSVKDRFTISRDDSKNTAYLQMNNLKTEDTAVYYCVRHGNFGNSYISYWAYWGQGTLVTVSSGGGGSGGGGSGGGGSQTVVTQEPSLTVSPGGTVTLTCGSSTGAVTSGNYPNWVQQKPGQAPRGLIGGTKFLAPGTPARFSGSLLGGKAALTLSGVQPEDEAEYYCVLWYSNRWVFGGGTKLTVLGGGGSQRFCTGHFGGLHPCNGHHHHHH

SEQ ID NO: 623 - protein, 5 aa, Artificial Sequence
  Synthetic Polypeptide
NYGMN

SEQ ID NO: 624 - protein, 17 aa, Artificial Sequence
  Synthetic Polypeptide
WINTYTGEPTYADKFQG

SEQ ID NO: 625 - protein, 13 aa, Artificial Sequence
  Synthetic Polypeptide
WSWSDGYYVYFDY

SEQ ID NO: 626 - protein, 17 aa, Artificial Sequence
  Synthetic Polypeptide
KSSQSVLDSSTNKNSLA

SEQ ID NO: 627 - protein, 7 aa, Artificial Sequence
  Synthetic Polypeptide
WASTRES

SEQ ID NO: 628 - protein, 9 aa, Artificial Sequence
  Synthetic Polypeptide
QQSAHFPIT

SEQ ID NO: 629 - protein, 122 aa, Artificial Sequence
  Synthetic Polypeptide
QVQLVQSGAEVKKPGESVKVSCKASGYTFTNYGMNWVKQAPGQCLEWMGWINTYTGEPTYADKFQGRVTMTTDTSTSTAYMEIRNLGGDDTAVYYCARWSWSDGYYVYFDYWGQGTSVTVSS

SEQ ID NO: 630 - protein, 113 aa, Artificial Sequence
  Synthetic Polypeptide
DIVMTQSPDSLTVSLGERTTINCKSSQSVLDSSTNKNSLAWYQQKPGQPPKLLLSWASTRESGIPDRFSGSGSGTDFTLTIDSPQPEDSATYYCQQSAHFPITFGCGTRLEIK

SEQ ID NO: 631 - protein, 250 aa, Artificial Sequence
  Synthetic Polypeptide
QVQLVQSGAEVKKPGESVKVSCKASGYTFTNYGMNWVKQAPGQCLEWMGWINTYTGEPTYADKFQGRVTMTTDTSTSTAYMEIRNLGGDDTAVYYCARWSWSDGYYVYFDYWGQGTSVTVSSGGGGSGGGGSGGGGSDIVMTQSPDSLTVSLGERTTINCKSSQSVLDSSTNKNSLAWYQQKPGQPPKLLLSWASTRESGIPDRFSGSGSGTDFTLTIDSPQPEDSATYYCQQSAHFPITFGCGTRLEIK

SEQ ID NO: 632 - protein, 553 aa, Artificial Sequence
  Synthetic Polypeptide
QRFVTGHFGGLYPANGGGGGSQVQLVQSGAEVKKPGESVKVSCKASGYTFTNYGMNWVKQAPGQCLEWMGWINTYTGEPTYADKFQGRVTMTTDTSTSTAYMEIRNLGGDDTAVYYCARWSWSDGYYVYFDYWGQGTSVTVSSGGGGSGGGGSGGGGSDIVMTQSPDSLTVSLGERTTINCKSSQSVLDSSTNKNSLAWYQQKPGQPPKLLLSWASTRESGIPDRFSGSGSGTDFTLTIDSPQPEDSATYYCQQSAHFPITFGCGTRLEIKSGGGGSEVQLVESGGGLVQPGGSLKLSCAASGFTFNKYAMNWVRQAPGKGLEWVARIRSKYNNYATYYADSVKDRFTISRDDSKNTAYLQMNNLKTEDTAVYYCVRHGNFGNSYISYWAYWGQGTLVTVSSGGGGSGGGGSGGGGSQTVVTQEPSLTVSPGGTVTLTCGSSTGAVTSGNYPNWVQQKPGQAPRGLIGGTKFLAPGTPARFSGSLLGGKAALTLSGVQPEDEAEYYCVLWYSNRWVFGGGTKLTVLGGGGSQRFCTGHFGGLHPCNGHHHHHH

SEQ ID NO: 633 - protein, 5 aa, Artificial Sequence
  Synthetic Polypeptide
NYGMN

SEQ ID NO: 634 - protein, 17 aa, Artificial Sequence
  Synthetic Polypeptide
WINTYTGEPTYADKFQG

SEQ ID NO: 635 - protein, 13 aa, Artificial Sequence
  Synthetic Polypeptide
WSWSDGYYVYFDY

SEQ ID NO: 636 - protein, 17 aa, Artificial Sequence
  Synthetic Polypeptide
KSSQSVLDSSTNKNSLA

SEQ ID NO: 637 - protein, 7 aa, Artificial Sequence
  Synthetic Polypeptide
WASTRES

SEQ ID NO: 638 - protein, 9 aa, Artificial Sequence
  Synthetic Polypeptide
QQSAHFPIT

SEQ ID NO: 639 - protein, 122 aa, Artificial Sequence; identical to SEQ ID NO: 619
  Synthetic Polypeptide

SEQ ID NO: 640 - protein, 113 aa, Artificial Sequence; identical to SEQ ID NO: 620
  Synthetic Polypeptide

SEQ ID NO: 641 - protein, 250 aa, Artificial Sequence; identical to SEQ ID NO: 621
  Synthetic Polypeptide

SEQ ID NO: 642 - protein, 553 aa, Artificial Sequence
  Synthetic Polypeptide
QRFCTGHFGGLHPCNGGGGGSQVQLVQSGAEVKKPGESVKVSCKASGYTFTNYGMNWVKQAPGQGLEWMGWINTYTGEPTYADKFQGRVTMTTDTSTSTAYMEIRNLGGDDTAVYYCARWSWSDGYYVYFDYWGQGTSVTVSSGGGGSGGGGSGGGGSDIVMTQSPDSLTVSLGERTTINCKSSQSVLDSSTNKNSLAWYQQKPGQPPKLLLSWASTRESGIPDRFSGSGSGTDFTLTIDSPQPEDSATYYCQQSAHFPITFGQGTRLEIKSGGGGSEVQLVESGGGLVQPGGSLKLSCAASGFTFNKYAMNWVRQAPGKGLEWVARIRSKYNNYATYYADSVKDRFTISRDDSKNTAYLQMNNLKTEDTAVYYCVRHGNFGNSYISYWAYWGQGTLVTVSSGGGGSGGGGSGGGGSQTVVTQEPSLTVSPGGTVTLTCGSSTGAVTSGNYPNWVQQKPGQAPRGLIGGTKFLAPGTPARFSGSLLGGKAALTLSGVQPEDEAEYYCVLWYSNRWVFGGGTKLTVLGGGGSQRFVTGHFGGLYPANGHHHHHH

SEQ ID NO: 643 - protein, 5 aa, Artificial Sequence
  Synthetic Polypeptide
NYGMN

SEQ ID NO: 644 - protein, 17 aa, Artificial Sequence
  Synthetic Polypeptide
WINTYTGEPTYADKFQG

SEQ ID NO: 645 - protein, 13 aa, Artificial Sequence
  Synthetic Polypeptide
WSWSDGYYVYFDY

SEQ ID NO: 646 - protein, 17 aa, Artificial Sequence
  Synthetic Polypeptide
KSSQSVLDSSTNKNSLA

SEQ ID NO: 647 - protein, 7 aa, Artificial Sequence
  Synthetic Polypeptide
WASTRES

SEQ ID NO: 648 - protein, 9 aa, Artificial Sequence
  Synthetic Polypeptide
QQSAHFPIT

SEQ ID NO: 649 - protein, 122 aa, Artificial Sequence; identical to SEQ ID NO: 629
  Synthetic Polypeptide

SEQ ID NO: 650 - protein, 113 aa, Artificial Sequence; identical to SEQ ID NO: 630
  Synthetic Polypeptide

SEQ ID NO: 651 - protein, 250 aa, Artificial Sequence; identical to SEQ ID NO: 631
  Synthetic Polypeptide

SEQ ID NO: 652 - protein, 553 aa, Artificial Sequence
  Synthetic Polypeptide
QRFCTGHFGGLHPCNGGGGGSQVQLVQSGAEVKKPGESVKVSCKASGYTFTNYGMNWVKQAPGQCLEWMGWINTYTGEPTYADKFQGRVTMTTDTSTSTAYMEIRNLGGDDTAVYYCARWSWSDGYYVYFDYWGQGTSVTVSSGGGGSGGGGSGGGGSDIVMTQSPDSLTVSLGERTTINCKSSQSVLDSSTNKNSLAWYQQKPGQPPKLLLSWASTRESGIPDRFSGSGSGTDFTLTIDSPQPEDSATYYCQQSAHFPITFGCGTRLEIKSGGGGSEVQLVESGGGLVQPGGSLKLSCAASGFTFNKYAMNWVRQAPGKGLEWVARIRSKYNNYATYYADSVKDRFTISRDDSKNTAYLQMNNLKTEDTAVYYCVRHGNFGNSYISYWAYWGQGTLVTVSSGGGGSGGGGSGGGGSQTVVTQEPSLTVSPGGTVTLTCGSSTGAVTSGNYPNWVQQKPGQAPRGLIGGTKFLAPGTPARFSGSLLGGKAALTLSGVQPEDEAEYYCVLWYSNRWVFGGGTKLTVLGGGGSQRFVTGHFGGLYPANGHHHHHH

SEQ ID NO: 653 - protein, 5 aa, Artificial Sequence
  Synthetic Polypeptide
NYGMN

SEQ ID NO: 654 - protein, 17 aa, Artificial Sequence
  Synthetic Polypeptide
WINTYTGEPTYADKFQG

SEQ ID NO: 655 - protein, 13 aa, Artificial Sequence
  Synthetic Polypeptide
WSWSDGYYVYFDY

SEQ ID NO: 656 - protein, 17 aa, Artificial Sequence
  Synthetic Polypeptide
KSSQSVLDSSTNKNSLA

SEQ ID NO: 657 - protein, 7 aa, Artificial Sequence
  Synthetic Polypeptide
WASTRES

SEQ ID NO: 658 - protein, 9 aa, Artificial Sequence
  Synthetic Polypeptide
QQSAHFPIT

SEQ ID NO: 659 - protein, 122 aa, Artificial Sequence; identical to SEQ ID NO: 619
  Synthetic Polypeptide

SEQ ID NO: 660 - protein, 113 aa, Artificial Sequence; identical to SEQ ID NO: 620
  Synthetic Polypeptide

SEQ ID NO: 661 - protein, 250 aa, Artificial Sequence; identical to SEQ ID NO: 621
  Synthetic Polypeptide

SEQ ID NO: 662 - protein, 578 aa, Artificial Sequence
  Synthetic Polypeptide
QRFVTGHFGGLYPANGGGGGSQVQLVQSGAEVKKPGESVKVSCKASGYTFTNYGMNWVKQAPGQGLEWMGWINTYTGEPTYADKFQGRVTMTTDTSTSTAYMEIRNLGGDDTAVYYCARWSWSDGYYVYFDYWGQGTSVTVSSGGGGSGGGGSGGGGSDIVMTQSPDSLTVSLGERTTINCKSSQSVLDSSTNKNSLAWYQQKPGQPPKLLLSWASTRESGIPDRFSGSGSGTDFTLTIDSPQPEDSATYYCQQSAHFPITFGQGTRLEIKSGGGGSEVQLVESGGGLVQPGGSLKLSCAASGFTFNKYAMNWVRQAPGKGLEWVARIRSKYNNYATYYADSVKDRFTISRDDSKNTAYLQMNNLKTEDTAVYYCVRHGNFGNSYISYWAYWGQGTLVTVSSGGGGSGGGGSGGGGSQTVVTQEPSLTVSPGGTVTLTCGSSTGAVTSGNYPNWVQQKPGQAPRGLIGGTKFLAPGTPARFSGSLLGGKAALTLSGVQPEDEAEYYCVLWYSNRWVFGGGTKLTVLGGGGSQRFCTGHFGGLHPCNGGGGGSGGGSRDWDFDVFGGGTPVGGHHHHHH

SEQ ID NO: 663 - protein, 5 aa, Artificial Sequence
  Synthetic Polypeptide
NYGMN

SEQ ID NO: 664 - protein, 17 aa, Artificial Sequence
  Synthetic Polypeptide
WINTYTGEPTYADKFQG

SEQ ID NO: 665 - protein, 13 aa, Artificial Sequence
  Synthetic Polypeptide
WSWSDGYYVYFDY

SEQ ID NO: 666 - protein, 17 aa, Artificial Sequence
  Synthetic polypeptide
KSSQSVLDSSTNKNSLA

SEQ ID NO: 667 - protein, 7 aa, Artificial Sequence
  Synthetic Polypeptide
WASTRES

SEQ ID NO: 668 - protein, 9 aa, Artificial Sequence
  Synthetic Polypeptide
QQSAHFPIT

SEQ ID NO: 669 - protein, 122 aa, Artificial Sequence; identical to SEQ ID NO: 629
  Synthetic Polypeptide

SEQ ID NO: 670 - protein, 113 aa, Artificial Sequence; identical to SEQ ID NO: 630
  Synthetic Polypeptide

SEQ ID NO: 671 - protein, 250 aa, Artificial Sequence; identical to SEQ ID NO: 631
  Synthetic Polypeptide

SEQ ID NO: 672 - protein, 578 aa, Artificial Sequence
  Synthetic Polypeptide
QRFVTGHFGGLYPANGGGGGSQVQLVQSGAEVKKPGESVKVSCKASGYTFTNYGMNWVKQAPGQCLEWMGWINTYTGEPTYADKFQGRVTMTTDTSTSTAYMEIRNLGGDDTAVYYCARWSWSDGYYVYFDYWGQGTSVTVSSGGGGSGGGGSGGGGSDIVMTQSPDSLTVSLGERTTINCKSSQSVLDSSTNKNSLAWYQQKPGQPPKLLLSWASTRESGIPDRFSGSGSGTDFTLTIDSPQPEDSATYYCQQSAHFPITFGCGTRLEIKSGGGGSEVQLVESGGGLVQPGGSLKLSCAASGFTFNKYAMNWVRQAPGKGLEWVARIRSKYNNYATYYADSVKDRFTISRDDSKNTAYLQMNNLKTEDTAVYYCVRHGNFGNSYISYWAYWGQGTLVTVSSGGGGSGGGGSGGGGSQTVVTQEPSLTVSPGGTVTLTCGSSTGAVTSGNYPNWVQQKPGQAPRGLIGGTKFLAPGTPARFSGSLLGGKAALTLSGVQPEDEAEYYCVLWYSNRWVFGGGTKLTVLGGGGSQRFCTGHFGGLHPCNGGGGGSGGGSRDWDFDVFGGGTPVGGHHHHHH

SEQ ID NO: 673 - protein, 5 aa, Artificial Sequence
  Synthetic Polypeptide
NYGMN

SEQ ID NO: 674 - protein, 17 aa, Artificial Sequence
  Synthetic Polypeptide
WINTYTGEPTYADKFQG

SEQ ID NO: 675 - protein, 13 aa, Artificial Sequence
  Synthetic Polypeptide
WSWSDGYYVYFDY

SEQ ID NO: 676 - protein, 17 aa, Artificial Sequence
  Synthetic Polypeptide
KSSQSVLDSSTNKNSLA

SEQ ID NO: 677 - protein, 7 aa, Artificial Sequence
  Synthetic Polypeptide
WASTRES

SEQ ID NO: 678 - protein, 9 aa, Artificial Sequence
  Synthetic Polypeptide
QQSAHFPIT

SEQ ID NO: 679 - protein, 122 aa, Artificial Sequence; identical to SEQ ID NO: 619
  Synthetic Polypeptide

SEQ ID NO: 680 - protein, 113 aa, Artificial Sequence; identical to SEQ ID NO: 620
  Synthetic Polypeptide

SEQ ID NO: 681 - protein, 250 aa, Artificial Sequence; identical to SEQ ID NO: 621
  Synthetic Polypeptide

SEQ ID NO: 682 - protein, 578 aa, Artificial Sequence
  Synthetic Polypeptide
QRFCTGHFGGLHPCNGGGGGSQVQLVQSGAEVKKPGESVKVSCKASGYTFTNYGMNWVKQAPGQGLEWMGWINTYTGEPTYADKFQGRVTMTTDTSTSTAYMEIRNLGGDDTAVYYCARWSWSDGYYVYFDYWGQGTSVTVSSGGGGSGGGGSGGGGSDIVMTQSPDSLTVSLGERTTINCKSSQSVLDSSTNKNSLAWYQQKPGQPPKLLLSWASTRESGIPDRFSGSGSGTDFTLTIDSPQPEDSATYYCQQSAHFPITFGQGTRLEIKSGGGGSEVQLVESGGGLVQPGGSLKLSCAASGFTFNKYAMNWVRQAPGKGLEWVARIRSKYNNYATYYADSVKDRFTISRDDSKNTAYLQMNNLKTEDTAVYYCVRHGNFGNSYISYWAYWGQGTLVTVSSGGGGSGGGGSGGGGSQTVVTQEPSLTVSPGGTVTLTCGSSTGAVTSGNYPNWVQQKPGQAPRGLIGGTKFLAPGTPARFSGSLLGGKAALTLSGVQPEDEAEYYCVLWYSNRWVFGGGTKLTVLGGGGSQRFVTGHFGGLYPANGGGGGSGGGSRDWDFDVFGGGTPVGGHHHHHH

SEQ ID NO: 683 - protein, 5 aa, Artificial Sequence
  Synthetic Polypeptide
NYGMN

SEQ ID NO: 684 - protein, 17 aa, Artificial Sequence
  Synthetic Polypeptide
WINTYTGEPTYADKFQG

SEQ ID NO: 685 - protein, 13 aa, Artificial Sequence
  Synthetic Polypeptide
WSWSDGYYVYFDY

SEQ ID NO: 686 - protein, 17 aa, Artificial Sequence
  Synthetic Polypeptide
KSSQSVLDSSTNKNSLA

SEQ ID NO: 687 - protein, 7 aa, Artificial Sequence
  Synthetic Polypeptide
WASTRES

SEQ ID NO: 688 - protein, 9 aa, Artificial Sequence
  Synthetic Polypeptide
QQSAHFPIT

SEQ ID NO: 689 - protein, 122 aa, Artificial Sequence; identical to SEQ ID NO: 629
  Synthetic Polypeptide

SEQ ID NO: 690 - protein, 113 aa, Artificial Sequence; identical to SEQ ID NO: 630
  Synthetic Polypeptide

SEQ ID NO: 691 - protein, 250 aa, Artificial Sequence; identical to SEQ ID NO: 631
  Synthetic Polypeptide

SEQ ID NO: 692 - protein, 578 aa, Artificial Sequence
  Synthetic Polypeptide
QRFCTGHFGGLHPCNGGGGGSQVQLVQSGAEVKKPGESVKVSCKASGYTFTNYGMNWVKQAPGQCLEWMGWINTYTGEPTYADKFQGRVTMTTDTSTSTAYMEIRNLGGDDTAVYYCARWSWSDGYYVYFDYWGQGTSVTVSSGGGGSGGGGSGGGGSDIVMTQSPDSLTVSLGERTTINCKSSQSVLDSSTNKNSLAWYQQKPGQPPKLLLSWASTRESGIPDRFSGSGSGTDFTLTIDSPQPEDSATYYCQQSAHFPITFGCGTRLEIKSGGGGSEVQLVESGGGLVQPGGSLKLSCAASGFTFNKYAMNWVRQAPGKGLEWVARIRSKYNNYATYYADSVKDRFTISRDDSKNTAYLQMNNLKTEDTAVYYCVRHGNFGNSYISYWAYWGQGTLVTVSSGGGGSGGGGSGGGGSQTVVTQEPSLTVSPGGTVTLTCGSSTGAVTSGNYPNWVQQKPGQAPRGLIGGTKFLAPGTPARFSGSLLGGKAALTLSGVQPEDEAEYYCVLWYSNRWVFGGGTKLTVLGGGGSQRFVTGHFGGLYPANGGGGGSGGGSRDWDFDVFGGGTPVGGHHHHHH
